(19) United States
(12) Patent Application Publication
(10) Pub. No.: US 2015/0315541 A1
(43) Pub. Date: Nov. 5, 2015

(54) MODIFIED POLYNUCLEOTIDES FOR ALTERING CELL PHENOTYPE

(71) Applicant: MODERNA THERAPEUTICS, INC., Cambridge, MA (US)

(72) Inventors: Stephane Bancel, Cambridge, MA (US); Antonin de Fougerolles, Waterloo (BE); Susan Whoriskey, Belmont, MA (US); Tirtha Chakraborty, Medford, MA (US); Eric Yi-Chun Huang, Boston, MA (US)

(21) Appl. No.: 14/651,305

(22) PCT Filed: Dec. 12, 2013
(86) PCT No.: PCT/US13/74560

§ 371 Date: Jun. 11, 2015

Related U.S. Application Data
(60) Provisional application No. 61/736,574, filed on Dec. 13, 2012.

(51) Int. Cl. C12N 5/071; C12N 9/02; C07K 14/535; C12P 21/00

(52) U.S. Cl. CPC C12N 5/0602; C12P 21/00; C12N 9/0069; C07K 14/535; C12Y 113/12; C12N 2500/40

(57) ABSTRACT

The present invention relates to compositions, methods and kits using cell phenotype altering polynucleotides, cell phenotype altering primary transcripts and cell phenotype altering mmRNA molecules.

### REFERENCE TO RELATED APPLICATIONS

[0001] The present application claims priority to U.S. Provisional Patent Application No. 61/736,574, filed Dec. 13, 2012, entitled Modified Polynucleotides for Altering Cell Phenotype, the contents of which is herein incorporated by reference in its entirety.

### REFERENCE TO THE SEQUENCE LISTING

[0002] The present application is being filed along with a Sequence Listing in electronic format. The Sequence Listing file, entitled M033SQLST.txt, was created on Dec. 11, 2013 and is 952,877 bytes in size. The information in electronic format of the Sequence Listing is incorporated herein by reference in its entirety.

### FIELD OF THE INVENTION

[0003] The invention relates to compositions, methods and kits using modified RNA to alter the phenotype of cells. The modified RNA of the invention may encode peptides, polypeptides or multiple proteins. The modified RNA of the invention may also be used to alter the phenotype of cells to produce cell phenotype altering polypeptides of interest. The cell phenotype altering polypeptides of interest may be used in therapeutics and/or clinical and research settings.

### BACKGROUND OF THE INVENTION

[0004] Altering the phenotype of cells in order to express a protein of interest or to change a cell to a different cell phenotype has been used in different clinical, therapeutic and research settings. Altering a phenotype of a cell is currently accomplished by expressing protein from DNA or viral vectors.

[0005] Currently there are studies being done to evaluate the use of human embryonic stem cells as a treatment option for various diseases such as Parkinson's disease and diabetes and injuries such as a spinal cord injury. Embryonic stem cells have the ability to grow indefinitely while maintaining pluripotency. However, there are ethical difficulties regarding the use of human embryos combined with the problem of tissue rejection following transplantation of the human embryonic stem cells into patients.

[0006] To avoid these ethical and rejection issues, induced pluripotent stem cells (iPSC) can be generated using the patient's own cells. Induction of iPSC was achieved by Takahashi and Yamanaka (Cell, 2006. 126(4):663-76; herein incorporated by reference in its entirety) using viral vectors to express KLF4, c-MYC, OCT4 and SOX2 otherwise collectively known as KMOS. Excisable lentiviral and transposon vectors, repeated application of transient plasmid, episomal and adenovirus vectors have also been used to try to derive iPSC (Chang, C.-W., et al., Stem Cells, 2009. 27(5):1042-1049; Kaji, K., et al., Nature, 2009. 458(7239):771-5; Okita, K., et al., Science, 2008. 322(5903):949-53; Stadtfeld, M., et al., Science, 2008. 322(5903):945-9; Woltjen, K., et al., Nature, 2009; Yu, J., et al., Science, 2009:1172482; Fusaki, N., et al., Proc Jpn Acad Ser B Phys Biol Sci, 2009. 85(8):348-62; each of which is herein incorporated by reference in its entirety). DNA-free methods to generate human iPSC has also been derived using serial protein transduction with recombinant proteins incorporating cell-penetrating peptide moieties (Kim, D., et al., Cell Stem Cell, 2009. 4(6): 472-476; Zhou, H., et al., Cell Stem Cell, 2009. 4(5):381-4; each of which is herein incorporated by reference in its entirety), and infectious transgene delivery using the Sendai virus (Fusaki, N., et al., Proc Jpn Acad Ser B Phys Biol Sci, 2009. 85(8): p. 348-62; herein incorporated by reference in its entirety).

[0007] However, the clinical application of iPSC is limited by the low efficiency of deriving iPSC and the fact that in order to have cellular cell phenotype altering the genome needs to be modified.

[0008] Therefore, there remains a need in art for cell phenotype altering cell fate using modified RNA encoding various factors related to altering cell fate such as, but not limited to cell phenotype altering factors, transdifferentiation factors, differentiation factors and dedifferentiation factors. The present invention builds upon the aforementioned disclosures and provides compositions, methods and kits using chemically modified messenger RNA (mRNA) encoding proteins which are useful in the field of personal regenerative medicine, cell therapy and therapies for other diseases.

### SUMMARY OF THE INVENTION

[0009] Described herein are compositions, methods and kits using modified RNA to modulate cellular function and/or pluripotent cells created by administration of modified RNA encoding factors that alter cell fate.

[0010] In one aspect, a composition comprising at least one cell phenotype altering polynucleotide is provided wherein each of said at least one polynucleotides comprises a first region of linked nucleosides, a first flanking region located at the 5′ terminus of the first region, a second flanking region located at the 3′ terminus of the first region and a 3′ tailing sequence of linked nucleosides. The first region may encode a cell phenotype altering polypeptide such as, but not limited to, SEQ ID NOs: 269-394. Further the first flanking region may include a sequence of linked nucleosides such as, but not limited to, the native 5′ untranslated region (UTR) of any of SEQ ID NOs: 269-394, SEQ ID NO: 1 and functional variants thereof. The second flanking region may include a sequence of linked nucleosides such as, but not limited to, the native 3′ UTR of any of SEQ ID NOs: 269-394, SEQ ID NOs 2-7 and functional variants thereof.

[0011] The 3′ tailing sequence of linked nucleosides may be, but is not limited to a poly-A tail or a Poly A-G quartet. The poly-A tail may be approximately 160 nucleotides in length.

[0012] The first region the cell phenotype altering polynucleotide may include at least a first modified nucleoside. The first region may also comprise a second modified nucleoside. In one aspect, neither the first modified nucleoside or the second modified nucleoside is 5-methylcytosine or pseudouridine. The modified nucleosides may be a purine and/or a pyrimidine nucleoside. The modified nucleosides may be selected from, but not limited to, a modified adenosine, guanosine, cytidine, and uridine. The nucleosides may be modified on the base and/or on the sugar.

[0013] The cell phenotype altering polynucleotide may comprise at least one 5′ cap structure. The 5′ cap structure may include, but is not limited to, Cap0, Cap1, ARCA, inosine, N1-methyl-guanosine, 2′fluoro-guanosine, 7-deaza-guanosine, 8-oxo-guanosine, 2-amino-guanosine, LNA-guanosine, and 2-azido-guanosine.

[0014] Additionally the cell phenotype altering polynucleotide may be purified.

[0015] The cell phenotype altering polynucleotide comprising a first region may encode a cell phenotype altering polypeptide such as, but not limited to, OCT such as OCT4, SOX such as SOX1, SOX2, SOX3, SOX15 and SOX18, NANOG, KLF such as KLF1, KLF2, KLF4 and KLF5, MYC such as c-MYC and n-MYC, REM2, TERT and LIN28 and variants thereof. The cell phenotype altering polypeptide may have a sequence such as, but not limited to, SEQ ID NO: 269-394.

[0016] The composition of the present invention may comprise at least one, at least two, at least three or at least four cell phenotype altering polynucleotides. In one embodiment, the composition comprises one cell phenotype altering polynucleotide. In another embodiment, the composition comprises two cell phenotype altering polynucleotides. In yet another embodiment, the composition comprises three cell phenotype altering polynucleotides. In yet another embodiment, the composition comprises four cell phenotype altering polynucleotides.

[0017] In one embodiment, the composition of the present invention may comprise a cell phenotype altering polynucleotide encoding OCT4. In another embodiment, the composition of the present invention may comprise a cell phenotype altering polynucleotide encoding SOX2.

[0018] In another embodiment, the composition of the present invention may comprise a cell phenotype altering polynucleotide encoding OCT4 and SOX2. The composition may further comprise a cell phenotype altering polynucleotide encoding NANOG.

[0019] In one embodiment, the composition of the present invention may comprise a cell phenotype altering polynucleotide encoding OCT4, SOX2, KLF4 and c-MYC. In another embodiment, the composition of the present invention may comprise a cell phenotype altering polynucleotide encoding OCT4, SOX2, LIN28 and NANOG.

[0020] Further provided are methods for altering the phenotype of a cell using the compositions and cell phenotype altering polynucleotides, primary constructs and mmRNA of the present invention. The cell may be a human cell or a non-human cell. Further, the cell may be a somatic cell such as, but not limited to, a fibroblast. The methods may provide contacting a cell with the compositions and cell phenotype altering polynucleotides, primary constructs and mmRNA of the present invention at least once. The cell may be contacted once, at least twice and/or a plurality of times.

[0021] The present invention also provides kits comprising the compositions described herein. The kits may comprise at least one of the cell phenotype altering polynucleotides, primary constructs and mmRNA of the present invention. The kits may further comprise packaging and instruction for use thereof, buffers, ligands, lipid or lipid based molecules, soluble interferon receptors or RNA encoding a soluble interferon receptor (e.g., B18R). Additionally the kits may comprise detectable labels such as but not limited to, radioisotopes, fluorophores, chromophores, enzymes, dyes, metal ions, biotin, avidin, streptavidin, haptens, and quantum dots.

[0022] Further provided are isolated oligonucleotides encoding any of the ell phenotype altering polynucleotides, primary constructs and mmRNA described herein and kits comprising the isolated oligonucleotides.

[0023] Vectors comprising the isolated oligonucleotides encoding any of the ell phenotype altering polynucleotides, primary constructs and mmRNA described herein, kits comprising the vectors and cell comprising the vectors are also described. The kits may comprise vectors containing at least one upstream T7 promoter, a phosphatase and/or apolymerase enzyme and/or a detectable label.

[0024] The details of various embodiments of the invention are set forth in the description below. Other features, objects, and advantages of the invention will be apparent from the description and the drawings, and from the claims.

### BRIEF DESCRIPTION OF THE DRAWINGS

[0025] The foregoing and other objects, features and advantages will be apparent from the following description of particular embodiments of the invention, as illustrated in the accompanying drawings in which like reference characters refer to the same parts throughout the different views. The drawings are not necessarily to scale, emphasis instead being placed upon illustrating the principles of various embodiments of the invention.

[0026] FIG. 1 is a schematic of a primary construct of the present invention.

[0027] FIG. 2 illustrates lipid structures in the prior art useful in the present invention. Shown are the structures for 98N12-5 (TETA5-LAP), DLin-DMA, DLin-K-DMA (2,2-Dilinoleyl-4-dimethylaminomethyl-[1,3]-dioxolane), DLin-KC2-DMA, DLin-MC3-DMA and C12-200.

### DETAILED DESCRIPTION

[0028] The present invention relates to compositions, methods and kits using modified RNA to alter the phenotype of cells. The modified RNA of the invention may encode peptides, polypeptides or multiple proteins. The modified RNA of the invention may also be used to alter the phenotype of cells to produce cell phenotype altering polypeptides of interest. The cell phenotype altering polypeptides of interest may be used in therapeutics and/or clinical and research settings.

[0029] Human embryonic stem cells have been thought to be useful to treat a host of diseases as they grow indefinitely and maintain their pluripotency and ability to differentiate into cells of all three germ layers. However, the human embryonic stem cells create an ethicial concern and pose a risk for tissue rejection following transplantation. Therefore, there remains a need in the art for compositions, methods and kits for producing induced pluripotent stem (iPS) cells from somatic cells.

[0030] The present invention addresses this need by providing nucleic acid based compounds or polynucleotides which encode a cell phenotype altering cell phenotype altering polypeptide of interest (e.g., modified mRNA or mmRNA) and which have structural and/or chemical features that avoid one or more of the problems in the art, for example, features which are useful for optimizing nucleic acid-based therapeutics while retaining structural and functional integrity, overcoming the threshold of expression, improving expression rates, half life and/or protein concentrations, optimizing protein localization, and avoiding deleterious bio-responses such as the immune response and/or degradation pathways.

[0031] Described herein are compositions, methods and kits of cell phenotype altering polynucleotides encoding one or more cell phenotype altering polypeptides of interest.

[0032] According to the present invention, these polynucleotides are preferably modified as to avoid the deficiencies of other polypeptide-encoding molecules of the art. Hence these polynucleotides are referred to as modified mRNA or mmRNA.

[0033] Provided herein, in part, are cell phenotype altering polynucleotides, primary constructs and/or mmRNA encoding cell phenotype altering polypeptides of interest which have been designed to improve one or more of the stability and/or clearance in tissues, receptor uptake and/or kinetics, cellular access by the compositions, engagement with translational machinery, mRNA half-life, translation efficiency, immune evasion, protein production capacity, secretion efficiency (when applicable), accessibility to circulation, protein half-life and/or modulation of a cell's status, function and/or activity.

[0034] In another aspect, the present disclosure provides chemical modifications located on the sugar moiety of the nucleotide.

[0035] In another aspect, the present disclosure provides chemical modifications located on the phosphate backbone of the cell phenotype altering polynucleotide, primary construct and/or mmRNA.

[0036] In another aspect, the present disclosure provides cell phenotype altering polynucleotides, primary constructs and/or mmRNA that contain chemical modifications, wherein the cell phenotype altering polynucleotide, primary construct and/or mmRNA reduces the cellular innate immune response, as compared to the cellular innate immune induced by a corresponding unmodified nucleic acid.

[0037] In another aspect, the present disclosure provides nucleic acid sequences comprising at least two nucleotides.

[0038] In another aspect, the present disclosure provides compositions comprising a compound as described herein. In some embodiments, the composition is a reaction mixture. In some embodiments, the composition is a pharmaceutical composition. In some embodiments, the composition is a cell culture. In some embodiments, the composition further comprises an RNA polymerase and a cDNA template. In some embodiments, the composition further comprises a nucleotide selected from the group consisting of adenosine, cytosine, guanosine, and uracil.

[0039] In a further aspect, the present disclosure provides methods of making a pharmaceutical formulation comprising a physiologically active secreted protein, comprising transfecting a first population of human cells with the pharmaceutical nucleic acid made by the methods described herein, wherein the secreted protein is active upon a second population of human cells.

[0040] In some embodiments, the secreted protein is capable of interacting with a receptor on the surface of at least one cell present in the second population. Non-limiting examples of secreted proteins include OCT such as OCT 4, SOX such as SOX1, SOX2, SOX3, SOX15 and SOX18, NANOG, KLF such as KLF1, KLF2, KLF4 and KLF5, NR5A2, MYC such as c-MYC and n-MYC, REM2, TERT and LIN28.

[0041] In some embodiments, the second population contains myeloblast cells that express the receptor for the secreted protein.

[0042] In certain embodiments, provided herein are combination therapeutics containing one or more cell phenotype altering cell phenotype altering polynucleotides, primary constructs and/or mmRNA containing translatable regions that encode for a cell phenotype altering protein or proteins which may be used to produce induced pluripotent stem cells from somatic cells.

[0043] In one embodiment, it is intended that the compounds of the present disclosure are stable. It is further appreciated that certain features of the present disclosure, which are, for clarity, described in the context of separate embodiments, can also be provided in combination in a single embodiment. Conversely, various features of the present disclosure which are, for brevity, described in the context of a single embodiment, can also be provided separately or in any suitable subcombination.

### I. COMPOSITIONS OF THE INVENTION (MMRNA)

[0044] The present invention provides nucleic acid molecules or polynucleotides, specifically cell phenotype altering polynucleotides, primary constructs and/or mmRNA which encode one or more cell phenotype altering polypeptides of interest. Herein, a cell phenotype altering polynucleotide may also be referred to as a polynucleotide. The term “nucleic acid,” in its broadest sense, includes any compound and/or substance that comprise a polymer of nucleotides. These polymers are often referred to as polynucleotides. Exemplary nucleic acids or polynucleotides of the invention include, but are not limited to, ribonucleic acids (RNAs), deoxyribonucleic acids (DNAs), threose nucleic acids (TNAs), glycol nucleic acids (GNAs), peptide nucleic acids (PNAs), locked nucleic acids (LNAs, including LNA having a β-D-ribo configuration, α-LNA having an α-L-ribo configuration (a diastereomer of LNA), 2′-amino-LNA having a 2′-amino functionalization, and 2′-amino-α-LNA having a 2′-amino functionalization) or hybrids thereof.

[0045] In preferred embodiments, the nucleic acid molecule is a messenger RNA (mRNA). As used herein, the term “messenger RNA” (mRNA) refers to any polynucleotide which encodes a cell phenotype altering polypeptide of interest and which is capable of being translated to produce the encoded cell phenotype altering polypeptide of interest in vitro, in vivo, in situ or ex vivo.

[0046] Traditionally, the basic components of an mRNA molecule include at least a coding region, a 5′UTR, a 3′UTR, a 5′ cap and a poly-A tail. Building on this wild type modular structure, the present invention expands the scope of functionality of traditional mRNA molecules by providing cell phenotype altering polynucleotides or cell phenotype altering primary RNA constructs which maintain a modular organization, but which comprise one or more structural and/or chemical modifications or alterations which impart useful properties to the reprograrmming polynucleotides including, in some embodiments, the lack of a substantial induction of the innate immune response of a cell into which the cell phenotype altering polynucleotide is introduced. As such, modified mRNA molecules or modified mRNA of the present invention are termed “mmRNA.” As used herein, a “structural” feature or modification is one in which two or more linked nucleotides are inserted, deleted, duplicated, inverted or randomized in a cell phenotype altering polynucleotide, primary construct or mmRNA without significant chemical modification to the nucleotides themselves. Because chemical bonds will necessarily be broken and reformed to effect a structural modification, structural modifications are of a chemical nature and hence are chemical modifications. However, structural modifications will result in a different sequence of nucleotides. For example, the polynucleotide “ATCG” may be chemically modified to “AT-5meC-G”. The same polynucleotide may be structurally modified from “ATCG” to “ATCCCG”. Here, the dinucleotide “CC” has been inserted, resulting in a structural modification to the polynucleotide.

Cell Phenotype Altering mmRNA Architecture

[0047] The mmRNA of the present invention are distinguished from wild type mRNA in their functional and/or structural design features which serve to, as evidenced herein, overcome existing problems of effective polypeptide production using nucleic acid-based therapeutics.

[0048] FIG. 1 shows a representative cell phenotype altering polynucleotide primary construct 100 of the present invention. As used herein, the term “primary construct” or “primary mRNA construct” refers to a polynucleotide transcript which encodes one or more cell phenotype altering polypeptides of interest and which retains sufficient structural and/or chemical features to allow the cell phenotype altering polypeptide of interest encoded therein to be translated. Cell phenotype altering primary constructs may be cell phenotype altering polynucleotides of the invention. When structurally or chemically modified, the cell phenotype altering primary construct may be referred to as an mmRNA.

[0049] Returning to FIG. 1, the cell phenotype altering primary construct 100 here contains a first region of linked nucleotides 102 that is flanked by a first flanking region 104 and a second flaking region 106. As used herein, the “first region” may be referred to as a “coding region” or “region encoding” or simply the “first region.” This first region may include, but is not limited to, the encoded cell phenotype altering polypeptide of interest. The cell phenotype altering polypeptide of interest may comprise at its 5′ terminus one or more signal sequences encoded by a signal sequence region 103. The flanking region 104 may comprise a region of linked nucleotides comprising one or more complete or incomplete 5′ UTRs sequences. The flanking region 104 may also comprise a 5′ terminal cap 108. The second flanking region 106 may comprise a region of linked nucleotides comprising one or more complete or incomplete 3′ UTRs. The flanking region 106 may also comprise a 3′ tailing sequence 110.

[0050] Bridging the 5′ terminus of the first region 102 and the first flanking region 104 is a first operational region 105. Traditionally this operational region comprises a Start codon. The operational region may alternatively comprise any translation initiation sequence or signal including a Start codon.

[0051] Bridging the 3′ terminus of the first region 102 and the second flanking region 106 is a second operational region 107. Traditionally this operational region comprises a Stop codon. The operational region may alternatively comprise any translation initiation sequence or signal including a Stop codon. According to the present invention, multiple serial stop codons may also be used.

[0052] Generally, the shortest length of the first region of the cell phenotype altering primary construct of the present invention can be the length of a nucleic acid sequence that is sufficient to encode for a dipeptide, a tripeptide, a tetrapeptide, a pentapeptide, a hexapeptide, a heptapeptide, an octapeptide, a nonapeptide, or a decapeptide. In another embodiment, the length may be sufficient to encode a peptide of 2-30 amino acids, e.g. 5-30, 10-30, 2-25, 5-25, 10-25, or 10-20 amino acids. The length may be sufficient to encode for a peptide of at least 11, 12, 13, 14, 15, 17, 20, 25 or 30 amino acids, or a peptide that is no longer than 40 amino acids, e.g. no longer than 35, 30, 25, 20, 17, 15, 14, 13, 12, 11 or 10 amino acids. Examples of dipeptides that the polynucleotide sequences can encode or include, but are not limited to, carnosine and anserine.

[0053] Generally, the length of the first region encoding the cell phenotype altering polypeptide of interest of the present invention is greater than about 30 nucleotides in length (e.g., at least or greater than about 35, 40, 45, 50, 55, 60, 70, 80, 90, 100, 120, 140, 160, 180, 200, 250, 300, 350, 400, 450, 500, 600, 700, 800, 900, 1,000, 1,100, 1,200, 1,300, 1,400, 1,500, 1,600, 1,700, 1,800, 1,900, 2,000, 2,500, and 3,000, 4,000, 5,000, 6,000, 7,000, 8,000, 9,000, 10,000, 20,000, 30,000, 40,000, 50,000, 60,000, 70,000, 80,000, 90,000 or up to and including 100,000 nucleotides). As used herein, the “first region” may be referred to as a “coding region” or “region encoding” or simply the “first region.”

[0054] In some embodiments, the cell phenotype altering polynucleotide, primary construct, or mmRNA includes from about 30 to about 100,000 nucleotides (e.g., from 30 to 50, from 30 to 100, from 30 to 250, from 30 to 500, from 30 to 1,000, from 30 to 1,500, from 30 to 3,000, from 30 to 5,000, from 30 to 7,000, from 30 to 10,000, from 30 to 25,000, from 30 to 50,000, from 30 to 70,000, from 100 to 250, from 100 to 500, from 100 to 1,000, from 100 to 1,500, from 100 to 3,000, from 100 to 5,000, from 100 to 7,000, from 100 to 10,000, from 100 to 25,000, from 100 to 50,000, from 100 to 70,000, from 100 to 100,000, from 500 to 1,000, from 500 to 1,500, from 500 to 2,000, from 500 to 3,000, from 500 to 5,000, from 500 to 7,000, from 500 to 10,000, from 500 to 25,000, from 500 to 50,000, from 500 to 70,000, from 500 to 100,000, from 1,000 to 1,500, from 1,000 to 2,000, from 1,000 to 3,000, from 1,000 to 5,000, from 1,000 to 7,000, from 1,000 to 10,000, from 1,000 to 25,000, from 1,000 to 50,000, from 1,000 to 70,000, from 1,000 to 100,000, from 1,500 to 3,000, from 1,500 to 5,000, from 1,500 to 7,000, from 1,500 to 10,000, from 1,500 to 25,000, from 1,500 to 50,000, from 1,500 to 70,000, from 1,500 to 100,000, from 2,000 to 3,000, from 2,000 to 5,000, from 2,000 to 7,000, from 2,000 to 10,000, from 2,000 to 25,000, from 2,000 to 50,000, from 2,000 to 70,000, and from 2,000 to 100,000).

[0055] According to the present invention, the first and second flanking regions may range independently from 15-1,000 nucleotides in length (e.g., greater than 30, 40, 45, 50, 55, 60, 70, 80, 90, 100, 120, 140, 160, 180, 200, 250, 300, 350, 400, 450, 500, 600, 700, 800, and 900 nucleotides or at least 30, 40, 45, 50, 55, 60, 70, 80, 90, 100, 120, 140, 160, 180, 200, 250, 300, 350, 400, 450, 500, 600, 700, 800, 900, and 1,000 nucleotides).

[0056] According to the present invention, the tailing sequence may range from absent to 500 nucleotides in length (e.g., at least 60, 70, 80, 90, 120, 140, 160, 180, 200, 250, 300, 350, 400, 450, or 500 nucleotides). Where the tailing region is a polyA tail, the length may be determined in units of or as a function of polyA Binding Protein binding. In this embodiment, the polyA tail is long enough to bind at least 4 monomers of PolyA Binding Protein. PolyA Binding Protein monomers bind to stretches of approximately 38 nucleotides. As such, it has been observed that polyA tails of about 80 nucleotides and 160 nucleotides are functional.

[0057] According to the present invention, the capping region may comprise a single cap or a series of nucleotides forming the cap. In this embodiment the capping region may be from 1 to 10, e.g. 2-9, 3-8, 4-7, 1-5, 5-10, or at least 2, or 10 or fewer nucleotides in length. In some embodiments, the cap is absent.

[0058] According to the present invention, the first and second operational regions may range from 3 to 40, e.g., 5-30, 10-20, 15, or at least 4, or 30 or fewer nucleotides in length and may comprise, in addition to a Start and/or Stop codon, one or more signal and/or restriction sequences.

Cyclic Cell Phenotype Altering mmRNA

[0059] According to the present invention, a cell phenotype altering primary construct or mmRNA may be cyclized, or concatemerized, to generate a translation competent molecule to assist interactions between poly-A binding proteins and 5′-end binding proteins. The mechanism of cyclization or concatemerization may occur through at least 3 different routes: 1) chemical, 2) enzymatic, and 3) ribozyme catalyzed. The newly formed 5′-/3′-linkage may be intramolecular or intermolecular.

[0060] In the first route, the 5′-end and the 3′-end of the nucleic acid contain chemically reactive groups that, when close together, form a new covalent linkage between the 5′-end and the 3′-end of the molecule. The 5′-end may contain an NHS-ester reactive group and the 3′-end may contain a 3′-amino-terminated nucleotide such that in an organic solvent the 3′-amino-terminated nucleotide on the 3′-end of a synthetic mRNA molecule will undergo a nucleophilic attack on the 5′-NHS-ester moiety forming a new 5′-/3′-amide bond.

[0061] In the second route, T4 RNA ligase may be used to enzymatically link a 5′-phosphorylated nucleic acid molecule to the 3′-hydroxyl group of a nucleic acid forming a new phosphorodiester linkage. In an example reaction, 1 μg of a nucleic acid molecule is incubated at 37° C. for 1 hour with 1-10 units of T4 RNA ligase (New England Biolabs, Ipswich, Mass.) according to the manufacturer's protocol. The ligation reaction may occur in the presence of a split oligonucleotide capable of base-pairing with both the 5′- and 3′-region in juxtaposition to assist the enzymatic ligation reaction.

[0062] In the third route, either the 5′- or 3′-end of the cDNA template encodes a ligase ribozyme sequence such that during in vitro transcription, the resultant nucleic acid molecule can contain an active ribozyme sequence capable of ligating the 5′-end of a nucleic acid molecule to the 3′-end of a nucleic acid molecule. The ligase ribozyme may be derived from the Group I Intron, Group I Intron, Hepatitis Delta Virus, Hairpin ribozyme or may be selected by SELEX (systematic evolution of ligands by exponential enrichment). The ribozyme ligase reaction may take 1 to 24 hours at temperatures between 0 and 37° C.

mmRNA Multimers

[0063] According to the present invention, multiple distinct cell phenotype altering polynucleotides, primary constructs or mmRNA may be linked together through the 3′-end using nucleotides which are modified at the 3′-terminus. Chemical conjugation may be used to control the stoichiometry of delivery into cells. For example, the glyoxylate cycle enzymes, isocitrate lyase and malate synthase, may be supplied into HepG2 cells at a 1:1 ratio to alter cellular fatty acid metabolism. This ratio may be controlled by chemically linking cell phenotype altering polynucleotides, primary constructs or mmRNA using a 3′-azido terminated nucleotide on one cell phenotype altering polynucleotide, primary construct or mmRNA species and a C5-ethynyl or alkynyl-containing nucleotide on the opposite cell phenotype altering polynucleotide, primary construct or mmRNA species. The modified nucleotide is added post-transcriptionally using terminal transferase (New England Biolabs, Ipswich, Mass.) according to the manufacturer's protocol. After the addition of the 3′-modified nucleotide, the two cell phenotype altering polynucleotide, primary construct or mmRNA species may be combined in an aqueous solution, in the presence or absence of copper, to form a new covalent linkage via a click chemistry mechanism as described in the literature.

[0064] In another example, more than two cell phenotype altering polynucleotides may be linked together using a functionalized linker molecule. For example, a functionalized saccharide molecule may be chemically modified to contain multiple chemical reactive groups (SH—, NH₂—, N3, etc. . . . ) to react with the cognate moiety on a 3′-functionalized mRNA molecule (i.e., a 3′-maleimide ester, 3′-NHS-ester, alkynyl). The number of reactive groups on the modified saccharide can be controlled in a stoichiometric fashion to directly control the stoichiometric ratio of conjugated cell phenotype altering polynucleotide, primary construct or mmRNA.

Cell Phenotype Altering mmRNA Conjugates and Combinations

[0065] In order to further enhance protein production, cell phenotype altering primary constructs or mmRNA of the present invention can be designed to be conjugated to other polynucleotides, dyes, intercalating agents (e.g. acridines), cross-linkers (e.g. psoralene, mitomycin C), porphyrins (TPPC4, texaphyrin, Sapphyrin), polycyclic aromatic hydrocarbons (e.g., phenazine, dihydrophenazine), artificial endonucleases (e.g. EDTA), alkylating agents, phosphate, amino, mercapto, PEG (e.g., PEG-40K), MPEG, [MPEG]₂, polyamino, alkyl, substituted alkyl, radiolabeled markers, enzymes, haptens (e.g. biotin), transport/absorption facilitators (e.g., aspirin, vitamin E, folic acid), synthetic ribonucleases, proteins, e.g., glycoproteins, or peptides, e.g., molecules having a specific affinity for a co-ligand, or antibodies e.g., an antibody, that binds to a specified cell type such as a cancer cell, endothelial cell, or bone cell, hormones and hormone receptors, non-peptidic species, such as lipids, lectins, carbohydrates, vitamins, cofactors, or a drug.

[0066] Conjugation may result in increased stability and/or half life and may be particularly useful in targeting the cell phenotype altering polynucleotides, primary constructs or mmRNA to specific sites in the cell, tissue or organism.

[0067] According to the present invention, the cell phenotype altering mmRNA or primary constructs may be administered with, or further encode one or more of RNAi agents, siRNAs, shRNAs, miRNAs, miRNA binding sites, antisense RNAs, ribozymes, catalytic DNA, tRNA, RNAs that induce triple helix formation, aptamers or vectors, and the like.

Bifunctional Cell Phenotype Altering mmRNA

[0068] In one embodiment of the invention are bifunctional polynucleotides (e.g., bifunctional cell phenotype altering primary constructs or bifunctional cell phenotype altering mmRNA). As the name implies, bifunctional polynucleotides are those having or capable of at least two functions. These molecules may also by convention be referred to as multi-functional.

[0069] The multiple functionalities of bifunctional cell phenotype altering polynucleotides may be encoded by the RNA (the function may not manifest until the encoded product is translated) or may be a property of the polynucleotide itself. It may be structural or chemical. Bifunctional modified polynucleotides may comprise a function that is covalently or electrostatically associated with the polynucleotides. Further, the two functions may be provided in the context of a complex of a cell phenotype altering mmRNA and another molecule.

[0070] Bifunctional cell phenotype altering polynucleotides may encode peptides which are anti-proliferative. These peptides may be linear, cyclic, constrained or random coil. They may function as aptamers, signaling molecules, ligands or mimics or mimetics thereof. Anti-proliferative peptides may, as translated, be from 3 to 50 amino acids in length. They may be 5-40, 10-30, or approximately 15 amino acids long. They may be single chain, multichain or branched and may form complexes, aggregates or any multi-unit structure once translated.

### Noncoding Cell Phenotype Altering Polynucleotides and Primary Constructs

[0071] As described herein, provided are cell phenotype altering polynucleotides and primary constructs having sequences that are partially or substantially not translatable, e.g., having a noncoding region. Such noncoding region may be the “first region” of the cell phenotype altering primary construct. Alternatively, the noncoding region may be a region other than the first region. Such molecules are generally not translated, but can exert an effect on protein production by one or more of binding to and sequestering one or more translational machinery components such as a ribosomal protein or a transfer RNA (tRNA), thereby effectively reducing protein expression in the cell or modulating one or more pathways or cascades in a cell which in turn alters protein levels. The cell phenotype altering polynucleotide or primary construct may contain or encode one or more long noncoding RNA (lncRNA, or lincRNA) or portion thereof, a small nucleolar RNA (sno-RNA), micro RNA (miRNA), small interfering RNA (siRNA) or Piwi-interacting RNA (piRNA).

### Cell Phenotype Altering Polypeptides of Interest

[0072] According to the present invention, the cell phenotype altering primary construct is designed to encode one or more cell phenotype altering polypeptides of interest or fragments thereof. A cell phenotype altering polypeptide of interest may include, but is not limited to, whole polypeptides, a plurality of polypeptides or fragments of polypeptides, which independently may be encoded by one or more nucleic acids, a plurality of nucleic acids, fragments of nucleic acids or variants of any of the aforementioned. As used herein, the term “cell phenotype altering polypeptides of interest” refers to any cell phenotype altering polypeptides which are selected to be encoded in the cell phenotype altering primary construct of the present invention. As used herein, “polypeptide” means a polymer of amino acid residues (natural or unnatural) linked together most often by peptide bonds. The term, as used herein, refers to proteins, polypeptides, and peptides of any size, structure, or function. In some instances the polypeptide encoded is smaller than about 50 amino acids and the polypeptide is then termed a peptide. If the polypeptide is a peptide, it will be at least about 2, 3, 4, or at least 5 amino acid residues long. Thus, polypeptides include gene products, naturally occurring polypeptides, synthetic polypeptides, homologs, orthologs, paralogs, fragments and other equivalents, variants, and analogs of the foregoing. A polypeptide may be a single molecule or may be a multi-molecular complex such as a dimer, trimer or tetramer. They may also comprise single chain or multichain polypeptides such as antibodies or insulin and may be associated or linked. Most commonly disulfide linkages are found in multichain polypeptides. The term polypeptide may also apply to amino acid polymers in which one or more amino acid residues are an artificial chemical analogue of a corresponding naturally occurring amino acid.

[0073] In one embodiment, a polypeptide of interest may be any of the polypeptides described in U.S. Provisional Patent Application No. 61/618,862 filed Apr. 2, 2012, entitled Modified Polynucleotides for the Production of Biologics, U.S. Provisional Patent Application No. 61/681,645 filed Aug. 10, 2012, entitled Modified Polynucleotides for the Production of Biologics, U.S. Provisional Patent Application No. 61/737,130, filed Dec. 14, 2012, entitled Modified Polynucleotides for the Production of Biologics, U.S. Provisional Patent Application No. 61/618,866, filed Apr. 2, 2012, entitled Modified Polynucleotides for the Production of Antibodies, U.S. Provisional Patent Application No. 61/681,647, filed Aug. 10, 2012, entitled Modified Polynucleotides for the Production of Antibodies, U.S. Provisional Patent Application No. 61/737,134, filed Dec. 14, 2012, entitled Modified Polynucleotides for the Production of Antibodies, U.S. Provisional Patent Application No. 61/618,868, filed Apr. 2, 2013, entitled Modified Polynucleotides for the Production of Vaccines, U.S. Provisional Patent Application No. 61/681,648, filed Aug. 10, 2012, entitled Modified Polynucleotides for the Production of Vaccines, U.S. Provisional Patent Application No. 61/737,135, filed Dec. 14, 2012, entitled Modified Polynucleotides for the Production of Vaccines, U.S. Provisional Patent Application No. 61/618,870, filed Apr. 2, 2012, entitled Modified Polynucleotides for the Production of Therapeutic Proteins and Peptides, U.S. Provisional Patent Application No. 61/681,649, filed Aug. 10, 2012, entitled Modified Polynucleotides for the Production of Therapeutic Proteins and Peptides, U.S. Provisional Patent Application No. 61/737,139, filed Dec. 14, 2012, entitled Modified Polynucleotides for the Production of Therapeutic Proteins and Peptides, U.S. Provisional Patent Application No. 61/618,873 filed Apr. 2, 2012, entitled Modified Polynucleotides for the Production of Secreted Proteins, U.S. Provisional Patent Application No. 61/681,650 filed Aug. 10, 2012, entitled Modified Polynucleotides for the Production of Secreted Proteins, U.S. Provisional Patent Application No. 61/737,147, filed Dec. 14, 2012, entitled Modified Polynucleotides for the Production of Secreted Proteins, U.S. Provisional Patent Application No. 61/618,878 filed Apr. 2, 2012, entitled Modified Polynucleotides for the Production of Plasma Membrane Proteins, U.S. Provisional Patent Application No. 61/681,654 filed Aug. 10, 2012, entitled Modified Polynucleotides for the Production of Plasma Membrane Proteins, U.S. Provisional Patent Application No. 61/737,152, filed Dec. 14, 2012, entitled Modified Polynucleotides for the Production of Plasma Membrane Proteins, U.S. Provisional Patent Application No. 61/618,885 filed Apr. 2, 2012, entitled Modified Polynucleotides for the Production of Cytoplasmic and Cytoskeletal Proteins, U.S. Provisional Patent Application No. 61/681,658 filed Aug. 10, 2012, entitled Modified Polynucleotides for the Production of Cytoplasmic and Cytoskeletal Proteins, U.S. Provisional Patent Application No. 61/737,155, filed Dec. 14, 2012, entitled Modified Polynucleotides for the Production of Cytoplasmic and Cytoskeletal Proteins, U.S. Provisional Patent Application No. 61/618,896, filed Apr. 2, 2012, entitled Modified Polynucleotides for the Production of Intracellular Membrane Bound Proteins, U.S. Provisional Patent Application No. 61/668,157, filed Jul. 5, 2012, entitled Modified Polynucleotides for the Production of Intracellular Membrane Bound Proteins, U.S. Provisional Patent Application No. 61/681,661, filed Aug. 10, 2012, entitled Modified Polynucleotides for the Production of Intracellular Membrane Bound Proteins, U.S. Provisional Patent Application No. 61/737,160, filed Dec. 14, 2012, entitled Modified Polynucleotides for the Production of Intracellular Membrane Bound Proteins, U.S. Provisional Patent Application No. 61/618,911 filed Apr. 2, 2012, entitled Modified Polynucleotides for the Production of Nuclear Proteins, U.S. Provisional Patent Application No. 61/681,667 filed Aug. 10, 2012, entitled Modified Polynucleotides for the Production of Nuclear Proteins, U.S. Provisional Patent Application No. 61/737,168, filed Dec. 14, 2012, entitled Modified Polynucleotides for the Production of Nuclear Proteins, U.S. Provisional Patent Application No. 61/618,922 filed Apr. 2, 2012, entitled Modified Polynucleotides for the Production of Proteins, U.S. Provisional Patent Application No. 61/681,675 filed Aug. 10, 2012, entitled Modified Polynucleotides for the Production of Proteins, U.S. Provisional Patent Application No. 61/737,174, filed Dec. 14, 2012, entitled Modified Polynucleotides for the Production of Proteins, U.S. Provisional Patent Application No. 61/618,935 filed Apr. 2, 2012, entitled Modified Polynucleotides for the Production of Proteins Associated with Human Disease, U.S. Provisional Patent Application No. 61/681,687 filed Aug. 10, 2012, entitled Modified Polynucleotides for the Production of Proteins Associated with Human Disease, U.S. Provisional Patent Application No. 61/737,184, filed Dec. 14, 2012, entitled Modified Polynucleotides for the Production of Proteins Associated with Human Disease, U.S. Provisional Patent Application No. 61/618,945 filed Apr. 2, 2012, entitled Modified Polynucleotides for the Production of Proteins Associated with Human Disease, U.S. Provisional Patent Application No. 61/681,696 filed Aug. 10, 2012, entitled Modified Polynucleotides for the Production of Proteins Associated with Human Disease, U.S. Provisional Patent Application No. 61/737,191, filed Dec. 14, 2012, entitled Modified Polynucleotides for the Production of Proteins Associated with Human Disease, U.S. Provisional Patent Application No. 61/618,953 filed Apr. 2, 2012, entitled Modified Polynucleotides for the Production of Proteins Associated with Human Disease, U.S. Provisional Patent Application No. 61/681,704 filed Aug. 10, 2012, entitled Modified Polynucleotides for the Production of Proteins Associated with Human Disease, U.S. Provisional Patent Application No. 61/737,203, filed Dec. 14, 2012, entitled Modified Polynucleotides for the Production of Proteins Associated with Human Disease, U.S. Provisional Patent Application No. 61/681,720, filed Aug. 10, 2012, entitled Modified Polynucleotides for the Production of Cosmetic Proteins and Peptides, U.S. Provisional Patent Application No. 61/737,213, filed Dec. 14, 2012, entitled Modified Polynucleotides for the Production of Cosmetic Proteins and Peptides, U.S. Provisional Patent Application No. 61/681,742 filed Aug. 10, 2012, entitled Modified Polynucleotides for the Production of Oncology-Related Proteins and Peptides, International Patent Publication No WO2013151666, filed Mar. 9, 2013, entitled Modified Polynucleotides for the Production of Biologics and Proteins Associated with Human Disease, International Patent Publication No WO2013151667, filed Mar. 9, 2013, entitled Modified Polynucleotides, International Patent Publication No WO2013151668, filed Mar. 9, 2013, entitled Modified Polynucleotides for the Production of Secreted Proteins, International Patent Publication No WO2013151663, filed Mar. 9, 2013, entitled Modified Polynucleotides for the Production of Membrane Proteins, International Patent Publication No WO2013151669, filed Mar. 9, 2013, entitled Modified Polynucleotides for the Production of Cytoplasmic and Cytoskeletal Proteins, International Patent Publication No WO2013151670, filed Mar. 9, 2013, entitled Modified Polynucleotides for the Production of Nuclear Proteins, International Patent Publication No WO2013151664, filed Mar. 9, 2013, entitled Modified Polynucleotides for the Production of Proteins, International Patent Publication No WO2013151665, filed Mar. 9, 2013, entitled Modified Polynucleotides for the Production of Proteins Associated with Human Disease, International Patent Publication No WO2013151671, filed Mar. 9, 2013, entitled Modified Polynucleotides for the Production of Cosmetic Proteins and Peptides, International Patent Publication No WO2013151672, filed Mar. 9, 2013, entitled Modified Polynucleotides for the Production of Oncology-Related Proteins and Peptides and International Patent Publication No WO2013151736, filed Mar. 15, 2013, entitled In Vivo Production of Proteins, the contents of each of which are herein incorporated by reference in its entirety.

[0074] The term “polypeptide variant” refers to molecules which differ in their amino acid sequence from a native or reference sequence. The amino acid sequence variants may possess substitutions, deletions, and/or insertions at certain positions within the amino acid sequence, as compared to a native or reference sequence. Ordinarily, variants will possess at least about 50% identity (homology) to a native or reference sequence, and preferably, they will be at least about 80%, more preferably at least about 90% identical (homologous) to a native or reference sequence.

[0075] In some embodiments “variant mimics” are provided. As used herein, the term “variant mimic” is one which contains one or more amino acids which would mimic an activated sequence. For example, glutamate may serve as a mimic for phosphoro-threonine and/or phosphoro-serine. Alternatively, variant mimics may result in deactivation or in an inactivated product containing the mimic, e.g., phenylalanine may act as an inactivating substitution for tyrosine; or alanine may act as an inactivating substitution for serine.

[0076] “Homology” as it applies to amino acid sequences is defined as the percentage of residues in the candidate amino acid sequence that are identical with the residues in the amino acid sequence of a second sequence after aligning the sequences and introducing gaps, if necessary, to achieve the maximum percent homology. Methods and computer programs for the alignment are well known in the art. It is understood that homology depends on a calculation of percent identity but may differ in value due to gaps and penalties introduced in the calculation.

[0077] By “homologs” as it applies to polypeptide sequences means the corresponding sequence of other species having substantial identity to a second sequence of a second species.

[0078] “Analogs” is meant to include polypeptide variants which differ by one or more amino acid alterations, e.g., substitutions, additions or deletions of amino acid residues that still maintain one or more of the properties of the parent or starting polypeptide.

[0079] The present invention contemplates several types of compositions which are polypeptide based including variants and derivatives. These include substitutional, insertional, deletion and covalent variants and derivatives. The term “derivative” is used synonymously with the term “variant” but generally refers to a molecule that has been modified and/or changed in any way relative to a reference molecule or starting molecule.

[0080] As such, cell phenotype altering mmRNA encoding cell phenotype altering polypeptides containing substitutions, insertions and/or additions, deletions and covalent modifications with respect to reference sequences, in particular the polypeptide sequences disclosed herein, are included within the scope of this invention. For example, sequence tags or amino acids, such as one or more lysines, can be added to the peptide sequences of the invention (e.g., at the N-terminal or C-terminal ends). Sequence tags can be used for peptide purification or localization. Lysines can be used to increase peptide solubility or to allow for biotinylation. Alternatively, amino acid residues located at the carboxy and amino terminal regions of the amino acid sequence of a peptide or protein may optionally be deleted providing for truncated sequences. Certain amino acids (e.g., C-terminal or N-terminal residues) may alternatively be deleted depending on the use of the sequence, as for example, expression of the sequence as part of a larger sequence which is soluble, or linked to a solid support.

[0081] “Substitutional variants” when referring to polypeptides are those that have at least one amino acid residue in a native or starting sequence removed and a different amino acid inserted in its place at the same position. The substitutions may be single, where only one amino acid in the molecule has been substituted, or they may be multiple, where two or more amino acids have been substituted in the same molecule.

[0082] As used herein the term “conservative amino acid substitution” refers to the substitution of an amino acid that is normally present in the sequence with a different amino acid of similar size, charge, or polarity. Examples of conservative substitutions include the substitution of a non-polar (hydrophobic) residue such as isoleucine, valine and leucine for another non-polar residue. Likewise, examples of conservative substitutions include the substitution of one polar (hydrophilic) residue for another such as between arginine and lysine, between glutamine and asparagine, and between glycine and serine. Additionally, the substitution of a basic residue such as lysine, arginine or histidine for another, or the substitution of one acidic residue such as aspartic acid or glutamic acid for another acidic residue are additional examples of conservative substitutions. Examples of non-conservative substitutions include the substitution of a non-polar (hydrophobic) amino acid residue such as isoleucine, valine, leucine, alanine, methionine for a polar (hydrophilic) residue such as cysteine, glutamine, glutamic acid or lysine and/or a polar residue for a non-polar residue.

[0083] “Insertional variants” when referring to polypeptides are those with one or more amino acids inserted immediately adjacent to an amino acid at a particular position in a native or starting sequence. “Immediately adjacent” to an amino acid means connected to either the alpha-carboxy or alpha-amino functional group of the amino acid.

[0084] “Deletional variants” when referring to polypeptides are those with one or more amino acids in the native or starting amino acid sequence removed. Ordinarily, deletional variants will have one or more amino acids deleted in a particular region of the molecule.

[0085] “Covalent derivatives” when referring to polypeptides include modifications of a native or starting protein with an organic proteinaceous or non-proteinaceous derivatizing agent, and/or post-translational modifications. Covalent modifications are traditionally introduced by reacting targeted amino acid residues of the protein with an organic derivatizing agent that is capable of reacting with selected side-chains or terminal residues, or by harnessing mechanisms of post-translational modifications that function in selected recombinant host cells. The resultant covalent derivatives are useful in programs directed at identifying residues important for biological activity, for immunoassays, or for the preparation of anti-protein antibodies for immunoaffinity purification of the recombinant glycoprotein. Such modifications are within the ordinary skill in the art and are performed without undue experimentation.

[0086] Certain post-translational modifications are the result of the action of recombinant host cells on the expressed polypeptide. Glutaminyl and asparaginyl residues are frequently post-translationally deamidated to the corresponding glutamyl and aspartyl residues. Alternatively, these residues are deamidated under mildly acidic conditions. Either form of these residues may be present in the cell phenotype altering polypeptides produced in accordance with the present invention.

[0087] Other post-translational modifications include hydroxylation of proline and lysine, phosphorylation of hydroxyl groups of seryl or threonyl residues, methylation of the alpha-amino groups of lysine, arginine, and histidine side chains (T. E. Creighton, Proteins: Structure and Molecular Properties, W.H. Freeman & Co., San Francisco, pp. 79-86 (1983)).

[0088] “Features” when referring to polypeptides are defined as distinct amino acid sequence-based components of a molecule. Features of the cell phenotype altering polypeptides encoded by the cell phenotype altering mmRNA of the present invention include surface manifestations, local conformational shape, folds, loops, half-loops, domains, half-domains, sites, termini or any combination thereof.

[0089] As used herein when referring to polypeptides the term “surface manifestation” refers to a polypeptide based component of a protein appearing on an outermost surface.

[0090] As used herein when referring to polypeptides the term “local conformational shape” means a polypeptide based structural manifestation of a protein which is located within a definable space of the protein.

[0091] As used herein when referring to polypeptides the term “fold” refers to the resultant conformation of an amino acid sequence upon energy minimization. A fold may occur at the secondary or tertiary level of the folding process. Examples of secondary level folds include beta sheets and alpha helices. Examples of tertiary folds include domains and regions formed due to aggregation or separation of energetic forces. Regions formed in this way include hydrophobic and hydrophilic pockets, and the like.

[0092] As used herein the term “turn” as it relates to protein conformation means a bend which alters the direction of the backbone of a peptide or polypeptide and may involve one, two, three or more amino acid residues.

[0093] As used herein when referring to polypeptides the term “loop” refers to a structural feature of a polypeptide which may serve to reverse the direction of the backbone of a peptide or polypeptide. Where the loop is found in a polypeptide and only alters the direction of the backbone, it may comprise four or more amino acid residues. Oliva et al. have identified at least 5 classes of protein loops (J. Mol Biol 266 (4): 814-830; 1997). Loops may be open or closed. Closed loops or “cyclic” loops may comprise 2, 3, 4, 5, 6, 7, 8, 9, 10 or more amino acids between the bridging moieties. Such bridging moieties may comprise a cysteine-cysteine bridge (Cys-Cys) typical in polypeptides having disulfide bridges or alternatively bridging moieties may be non-protein based such as the dibromozylyl agents used herein.

[0094] As used herein when referring to polypeptides the term “half-loop” refers to a portion of an identified loop having at least half the number of amino acid resides as the loop from which it is derived. It is understood that loops may not always contain an even number of amino acid residues. Therefore, in those cases where a loop contains or is identified to comprise an odd number of amino acids, a half-loop of the odd-numbered loop will comprise the whole number portion or next whole number portion of the loop (number of amino acids of the loop/2+/−0.5 amino acids). For example, a loop identified as a 7 amino acid loop could produce half-loops of 3 amino acids or 4 amino acids (7/2=3.5+/−0.5 being 3 or 4).

[0095] As used herein when referring to polypeptides the term “domain” refers to a motif of a polypeptide having one or more identifiable structural or functional characteristics or properties (e.g., binding capacity, serving as a site for protein-protein interactions).

[0096] As used herein when referring to polypeptides the term “half-domain” means a portion of an identified domain having at least half the number of amino acid resides as the domain from which it is derived. It is understood that domains may not always contain an even number of amino acid residues. Therefore, in those cases where a domain contains or is identified to comprise an odd number of amino acids, a half-domain of the odd-numbered domain will comprise the whole number portion or next whole number portion of the domain (number of amino acids of the domain/2+/−0.5 amino acids). For example, a domain identified as a 7 amino acid domain could produce half-domains of 3 amino acids or 4 amino acids (7/2=3.5+/−0.5 being 3 or 4). It is also understood that sub-domains may be identified within domains or half-domains, these subdomains possessing less than all of the structural or functional properties identified in the domains or half domains from which they were derived. It is also understood that the amino acids that comprise any of the domain types herein need not be contiguous along the backbone of the polypeptide (i.e., nonadjacent amino acids may fold structurally to produce a domain, half-domain or subdomain).

[0097] As used herein when referring to polypeptides the terms “site” as it pertains to amino acid based embodiments is used synonymously with “amino acid residue” and “amino acid side chain.” A site represents a position within a peptide or polypeptide that may be modified, manipulated, altered, derivatized or varied within the polypeptide based molecules of the present invention.

[0098] As used herein the terms “termini” or “terminus” when referring to polypeptides refers to an extremity of a peptide or polypeptide. Such extremity is not limited only to the first or final site of the peptide or polypeptide but may include additional amino acids in the terminal regions. The polypeptide based molecules of the present invention may be characterized as having both an N-terminus (terminated by an amino acid with a free amino group (NH₂)) and a C-terminus (terminated by an amino acid with a free carboxyl group (COOH)). Proteins of the invention are in some cases made up of multiple polypeptide chains brought together by disulfide bonds or by non-covalent forces (multimers, oligomers). These sorts of proteins will have multiple N- and C-termini. Alternatively, the termini of the polypeptides may be modified such that they begin or end, as the case may be, with a non-polypeptide based moiety such as an organic conjugate.

[0099] Once any of the features have been identified or defined as a desired component of a polypeptide to be encoded by the cell phenotype altering primary construct or mmRNA of the invention, any of several manipulations and/or modifications of these features may be performed by moving, swapping, inverting, deleting, randomizing or duplicating. Furthermore, it is understood that manipulation of features may result in the same outcome as a modification to the molecules of the invention. For example, a manipulation which involved deleting a domain would result in the alteration of the length of a molecule just as modification of a nucleic acid to encode less than a full length molecule would.

[0100] Modifications and manipulations can be accomplished by methods known in the art such as, but not limited to, site directed mutagenesis. The resulting modified molecules may then be tested for activity using in vitro or in vivo assays such as those described herein or any other suitable screening assay known in the art.

[0101] According to the present invention, the cell phenotype altering polypeptides may comprise a consensus sequence which is discovered through rounds of experimentation. As used herein a “consensus” sequence is a single sequence which represents a collective population of sequences allowing for variability at one or more sites.

[0102] As recognized by those skilled in the art, protein fragments, functional protein domains, and homologous proteins are also considered to be within the scope of cell phenotype altering polypeptides of interest of this invention. For example, provided herein is any protein fragment (meaning a polypeptide sequence at least one amino acid residue shorter than a reference polypeptide sequence but otherwise identical) of a reference protein 10, 20, 30, 40, 50, 60, 70, 80, 90, 100 or greater than 100 amino acids in length. In another example, any protein that includes a stretch of about 20, about 30, about 40, about 50, or about 100 amino acids which are about 40%, about 50%, about 60%, about 70%, about 80%, about 90%, about 95%, or about 100% identical to any of the sequences described herein can be utilized in accordance with the invention. In certain embodiments, a polypeptide to be utilized in accordance with the invention includes 2, 3, 4, 5, 6, 7, 8, 9, 10, or more mutations as shown in any of the sequences provided or referenced herein.

### Encoded Cell Phenotype Altering Polypeptides

[0103] The cell phenotype altering polynucleotides, primary constructs or mmRNA of the present invention may be designed to encode cell phenotype altering polypeptides of interest such as, but not limited to, those that expression one or more transcription factors, death receptors, death receptor ligands, Type I or Type II interferon (IFN) genes, reprogramming factors, differentiation factors, de-differentiation factors or developmental potential altering factors.

[0104] In one embodiment cell phenotype altering primary constructs or mmRNA may encode variant polypeptides which have a certain identity with a reference polypeptide sequence. As used herein, a “reference polypeptide sequence” refers to a starting polypeptide sequence. Reference sequences may be wild type sequences or any sequence to which reference is made in the design of another sequence. A “reference polypeptide sequence” may, e.g., be any one of SEQ ID NOs: 269-394 as disclosed herein, e.g., any of SEQ ID NOs 269, 270, 271, 272, 273, 274, 275, 276, 277, 278, 279, 280, 281, 282, 283, 284, 285, 286, 287, 288, 289, 290, 291, 292, 293, 294, 295, 296, 297, 298, 299, 300, 301, 302, 303, 304, 305, 306, 307, 308, 309, 310, 311, 312, 313, 314, 315, 316, 317, 318, 319, 320, 321, 322, 323, 324, 325, 326, 327, 328, 329, 330, 331, 332, 333, 334, 335, 336, 337, 338, 339, 340, 341, 342, 343, 344, 345, 346, 347, 348, 349, 350, 351, 352, 353, 354, 355, 356, 357, 358, 359, 360, 361, 362, 363, 364, 365, 366, 367, 368, 369, 370, 371, 372, 373, 374, 375, 376, 377, 378, 379, 380, 381, 382, 383, 384, 385, 386, 387, 388, 389, 390, 391, 392, 393 and 394.

[0105] In addition, a “reference polypeptide sequence” may, e.g., be any one of the human transcription factors listed in Table 1, cluster of differentiation molecules in Table 2 or membrane bound receptors in Table 3 of International Publication No. WO 2011130624 or the IFN-signature genes, cell-specific polypeptides, death receptors and death receptor ligands and/or mitogen receptors listed in International Publication No. WO2011130624; herein incorporated by reference in its entirety.

[0106] The term “identity” as known in the art, refers to a relationship between the sequences of two or more peptides, as determined by comparing the sequences. In the art, identity also means the degree of sequence relatedness between peptides, as determined by the number of matches between strings of two or more amino acid residues. Identity measures the percent of identical matches between the smaller of two or more sequences with gap alignments (if any) addressed by a particular mathematical model or computer program (i.e., “algorithms”). Identity of related peptides can be readily calculated by known methods. Such methods include, but are not limited to, those described in Computational Molecular Biology, Lesk, A. M., ed., Oxford University Press, New York, 1988; Biocomputing: Informatics and Genome Projects, Smith, D. W., ed., Academic Press, New York, 1993; Computer Analysis of Sequence Data, Part 1, Griffin, A. M., and Griffin, H. G., eds., Humana Press, New Jersey, 1994; Sequence Analysis in Molecular Biology, von Heinje, G., Academic Press, 1987; Sequence Analysis Primer, Gribskov, M. and Devereux, J., eds., M. Stockton Press, New York, 1991; and Carillo et al., SIAM J. Applied Math. 48, 1073 (1988).

[0107] In some embodiments, the polypeptide variant may have the same or a similar activity as the reference polypeptide. Alternatively, the variant may have an altered activity (e.g., increased or decreased) relative to a reference polypeptide. Generally, variants of a particular polynucleotide or polypeptide of the invention will have at least about 40%, 45%, 50%, 55%, 60%, 65%, 70%, 75%, 80%, 85%, 90%, 91%, 92%, 93%, 94%, 95%, 96%, 97%, 98%, 99% but less than 100% sequence identity to that particular reference polynucleotide or polypeptide as determined by sequence alignment programs and parameters described herein and known to those skilled in the art. Such tools for alignment include those of the BLAST suite (Stephen F. Altschul, Thomas L. Madden, Alejandro A. Schïffer, Jinghui Zhang, Zheng Zhang, Webb Miller, and David J. Lipman (1997), “Gapped BLAST and PSI-BLAST: a new generation of protein database search programs”, Nucleic Acids Res. 25:3389-3402.) Other tools are described herein, specifically in the definition of “Identity.”

[0108] Default parameters in the BLAST algorithm include, for example, an expect threshold of 10, Word size of 28, Match/Mismatch Scores 1, −2, Gap costs Linear. Any filter can be applied as well as a selection for species specific repeats, e.g., Homo sapiens.

### Reprogramming Factors

[0109] The cell phenotype altering polynucleotides, primary constructs or mmRNA disclosed herein, may encode one or more reprogramming factors. As used herein, a “reprogramming factor” is a developmental potential altering factor, such as a protein, RNA or small molecule, the expression of which contributes to the reprogramming of a cell to a less differentiated or undifferentiated state. As an example, a reprogramming factor may be used to alter the phenotype of a somatic cell, a precursor somatic cell, partially reprogrammed somatic cell, pluripotent cell, multipotent cell, differentiated cell or an embryonic cell into a pluripotent stem cell or its immediate precursor cell. Reprogramming of a cell may be accomplished by a single transfection or a repeated transfection of a cell-altering polynucleotide, primary construct and/or mmRNA encoding a reprogramming factor.

[0110] The term “reprogramming” refers to a process that reverses the developmental potential of a cell or population of cells. This process includes driving a cell to a state with higher developmental potential. The cell to be reprogrammed may be partially or terminally differentiated prior to undergoing reprogramming.

[0111] A reprogramming factor can be a transcription factor that can reprogram cells to a pluripotent state. Non-limiting examples of reprogramming factors include, OCT such as OCT 4, SOX such as SOX1, SOX2, SOX3, SOX15 and SOX18, NANOG, KLF such as KLF1, KLF2, KLF4 and KLF5, NR5A2, MYC such as c-MYC and n-MYC, REM2, TERT and LIN28.

[0112] As used herein, the term “OCT” refers to the octamer-binding protein family including any variants thereof. The term “OCT4” refers to the ocatmer-binding protein 4 including any variants thereof. OCT4 is also known in the art as POU class 5 homeobox 1 and octamer-binding protein 3 (OCT3). In one embodiment, OCT4 refers to a protein having a sequence such as, but not limited to, SEQ ID NO: 269-294.

[0113] As used herein, the term “SOX” refers to the SRY (sex determining region Y)-box protein family including any variants thereof. The term “SOX1” refers to the protein SRY (sex determining region Y)-box 1 including any variants thereof. In one embodiment, SOX1 refers to a protein having a sequence, such as, but not limited to, SEQ ID NO: 295. The term “SOX2” refers to the protein SRY (sex determining region Y)-box 2 including any variants thereof. In one embodiment, SOX2 refers to a protein having a sequence, such as, but not limited to, SEQ ID NO: 296 and 297. The term “SOX3” refers to the protein SRY (sex determining region Y)-box 3 including any variants thereof. In one embodiment, SOX3 refers to a protein having a sequence, such as, but not limited to, SEQ ID NO: 298. The term “SOX15” refers to the protein SRY (sex determining region Y)-box 15 including any variants thereof. In one embodiment, SOX15 refers to a protein having a sequence, such as, but not limited to, SEQ ID NO: 299. The term “SOX18” refers to the protein SRY (sex determining region Y)-box 18 including any variants thereof. In one embodiment, SOX18 refers to a protein having a sequence, such as, but not limited to, SEQ ID NO: 300.

[0114] As used herein, the term “NANOG” refers to the protein Nanog homeobox including any variants thereof. In one embodiment, NANOG refers to a protein having a sequence, such as, but not limited to, SEQ ID NO: 301 and 302.

[0115] As used herein, the term “KLF” refers to the kruppel-like factor protein family including any variants thereof. The term “KLF1” refers to the protein kruppel-like factor 1 including any variants thereof. In one embodiment, KLF1 refers to a protein having a sequence, such as, but not limited to, SEQ ID NO: 303. The term “KLF2” refers to the protein kruppel-like factor 2 including any variants thereof. In one embodiment, KLF2 refers to a protein having a sequence, such as, but not limited to, SEQ ID NO: 304. The term “KLF4” refers to the protein kruppel-like factor 4 including any variants thereof. In one embodiment, KLF4 refers to a protein having a sequence, such as, but not limited to, SEQ ID NO: 305-308. The term “KLF5” refers to the protein kruppel-like factor 5 including any variants thereof. In one embodiment, KLF5 refers to a protein having a sequence, such as, but not limited to, SEQ ID NO: 309-311.

[0116] As used herein, the term “NR5A2” refers to the protein nuclear receptor subfamily 5, group A, member 1 including any variants thereof. In one embodiment, NR5A2 refers to a protein having a sequence, such as, but not limited to, SEQ ID NO: 312-319.

[0117] As used herein, the term “MYC” refers to the v-myc myelocytomatosis viral oncogene protein family including any variants thereof. The term “c-MYC” refers to the protein v-myc myelocytomatosis viral oncogene homolog (avian) including any variants thereof. In one embodiment, c-MYC refers to a protein having a sequence, such as, but not limited to, SEQ ID NO: 320-323. The term “n-MYC” refers to the protein v-myc myelocytomatosis viral related oncogene, neuroblastoma derived (avian) including any variants thereof. In one embodiment, n-MYC refers to a protein having a sequence, such as, but not limited to, SEQ ID NO: 324 and 325.

[0118] As used herein, the term “REM2” refers to the protein RAS (RAD and GEM)-like GTP binding 2 protein including any variants thereof. In one embodiment, REM2 refers to a protein having a sequence, such as, but not limited to, SEQ ID NO: 326 and 327.

[0119] As used herein, the term “TERT” refers to the protein telomerase reverse transcriptase protein including any variants thereof. In one embodiment, TERT refers to a protein having a sequence, such as, but not limited to, SEQ ID NO: 328-331

[0120] As used herein, the term “LIN28” refers to the lin-28 homolog protein including any variants thereof. In one embodiment, LIN28 refers to a protein having a sequence, such as, but not limited to, SEQ ID NO: 332-334.

[0121] In one embodiment, reprogramming encompasses a complete or partial reversion of the differentiation state. As a non-limiting example, reprogramming can create an increase in the developmental potential of a cell, to that of a cell having a pluripotent state. As another non-limiting example, the partial reversion of the differentiation state of a cell to a state that renders the cell more susceptible to complete reprogramming to a pluripotent state when subject to additional manipulations. Manipulations are described in International Publication No. WO2011130624, herein incorporated by reference in its entirety. In another embodiment, reprogramming encompasses a partial increase in the developmental potential of a cell such as, but not limited, increasing a somatic cell or a unipotent cell to a multipotent cell.

[0122] In one embodiment, reprogramming encompasses driving a somatic cell to a pluripotent state so that cell has a developmental potential of an embryonic stem cell.

[0123] In one embodiment, the cell phenotype altering polynucleotides, primary constructs or mmRNA described herein cause the cell to assume a pluripotent-like state or an embryonic stem cell phenotype.

### Differentiation and De-Differentiation Factors

[0124] The cell phenotype altering polynucleotides, primary constructs or mmRNA disclosed herein, may encode one or more differentiation factors. As used herein, the term “differentiation factor” refers to a developmental potential altering factor such as a protein, RNA or small molecule that can induce a cell to differentiate to a desired cell-type. As used herein, “differentiate” or “differentiating” refers to the process where an uncommitted or less committed cell acquires the features of a committed cell. As a non-limiting example, a committed cell can be a cardiomyocyte, a nerve cell or a skeletal muscle cell. A cell is “committed” when the cell is far enough into the differentiation pathway where, under normal circumstances, it will continue to differentiate into a specific cell type or subset of cell type instead of into a different cell type or reverting to a lesser differentiated cell type.

[0125] A differentiated cell also encompasses cells that are partially differentiated, such as multipotent cells or cells that are stable, non-pluripotent partially reprogrammed or partially differentiated cells. Further, a differentiated cell can also be a cell of a more specialized cell type derived from a less specialized cell type.

[0126] Non-limiting examples of differentiation factors include, ASCL1, BRN2, MYT1L, MYOD1, CEBP-alpha, PU.1, PRDM16, HNF4-alpha, BDNF, NTF such as NTF3 and NTF4, EGF, CNTF, NGF, Sonic hedgehog, FGF such as FGF-8, and TGF such as TGF-alpha and TGF-beta.

[0127] As used herein, the term “ASCL1” refers to the achaete-scute complex homolog 1 protein including any variants thereof. In one embodiment, ASCL1 refers to a protein having a sequence such as, but not limited to, SEQ ID NO: 335.

[0128] As used herein, the term “BRN2” refers to the POU class 3 homeobox 2 protein including any variants thereof. BRN2 is also known in the art as OTF7 and POU domain class 3, transcription factor 2 (POU3F2). In one embodiment, BRN2 refers to a protein having a sequence such as, but not limited to, SEQ ID NO: 336 and 337.

[0129] As used herein, the term “MYT1L” refers to the myelin transcription factor 1-like protein including any variants thereof. In one embodiment, MYT1L refers to a protein having a sequence such as, but not limited to, SEQ ID NO: 338-341.

[0130] As used herein, the term “MYOD1” refers to the myogenic differentiation 1 protein including any variants thereof. In one embodiment, MYOD1 refers to a protein having a sequence such as, but not limited to, SEQ ID NO: 342

[0131] As used herein, the term “CEBP-alpha” refers to CCAAT/enhancer binding protein (C/EBP), alpha protein including any variants thereof. In one embodiment, CEBP-alpha refers to a protein having a sequence such as, but not limited to, SEQ ID NO: 343.

[0132] As used herein, the term “PU.1” refers to spleen focus forming virus (SFFV) proviral integration oncogene spi1 protein including any variants thereof. In one embodiment, PU.1 refers to a protein having a sequence such as, but not limited to, SEQ ID NO: 334 and 345

[0133] As used herein, the term “PRDM16” refers to PR domain containing 16 protein including any variants thereof. In one embodiment, PRDM16 refers to a protein having a sequence such as, but not limited to, SEQ ID NO: 346-351.

[0134] As used herein, the term “HNF4-alpha” refers to hepatocyte nuclear factor 4, alpha protein including any variants thereof. In one embodiment, HNF4-alpha refers to a protein having a sequence such as, but not limited to, SEQ ID NO: 352-357.

[0135] As used herein, the term “BDNF” refers to brain-derived neurotrophic factor protein including any variants thereof. In one embodiment, BDNF refers to a protein having a sequence such as, but not limited to, SEQ ID NO: 358-374.

[0136] As used herein, the term “NTF” refers to the neurotrophin protein family including any variants thereof. The term “NTF3” refers to neurotrophin 3 including any variants thereof. In one embodiment, NTF3 refers to a protein having a sequence such as, but not limited to, SEQ ID NO: 375 and 376. The term “NTF4” refers to neurotrophin 4 including any variants thereof. In one embodiment, NTF4 refers to a protein having a sequence such as, but not limited to, SEQ ID NO: 377.

[0137] As used herein, the term “EGF” refers to epidermal growth factor including any variants thereof. In one embodiment, EGF refers to a protein having a sequence such as, but not limited to, SEQ ID NO: 378-380.

[0138] As used herein, the term “CNTF” refers to ciliary neurotrophic factor including any variants thereof. In one embodiment, CNTF refers to a protein having a sequence such as, but not limited to, SEQ ID NO: 381.

[0139] As used herein, the term “NGF” refers to nerve growth factor protein family including any variants thereof. In one embodiment, NGF refers to a protein having a sequence such as, but not limited to, SEQ ID NO: 382.

[0140] As used herein, the phrase “sonic hedgehog” refers to the sonic hedgehog protein including any variants thereof. In one embodiment, sonic hedgehog refers to a protein having a sequence such as, but not limited to, SEQ ID NO: 383.

[0141] As used herein, the term “FGF” refers to the fibroblast growth factor protein family including any variants thereof. The term “FGF-8” refers to fibroblast growth factor-8 protein including any variants thereof. In one embodiment, FGF-8 refers to a protein having a sequence such as, but not limited to, SEQ ID NO: 384-387.

[0142] As used herein, the term “TGF” refers to the transforming growth factor protein family including any variants thereof. The term “TGF-alpha” refers to transforming growth factor, alpha protein including any variants thereof. In one embodiment, TGF-alpha refers to a protein having a sequence, such as, but not limited to, SEQ ID NO: 388 and 389. The term “TGF-beta” refers to transforming growth factor, beta protein including any variants thereof. In one embodiment, TGF-beta refers to TGFB1 a protein having a sequence such as, but not limited to, SEQ ID NO: 390, TGFB2 a protein having a sequence such as, but not limited to, SEQ ID NO: 391-392 or TGFB3 a protein having a sequence such as, but not limited to, SEQ ID NO: 393 and 394.

[0143] The cell phenotype altering polynucleotides, primary constructs or mmRNA disclosed herein, may encode one or more de-differentiation factors. As used herein, “de-differentiation” refers to the process of reverting a cell to a less committed position within the lineage of a cell.

[0144] The lineage of a cell defines the heredity or fate of the cell. The differentiation of cells using the cell phenotype altering polynucleotides, primary constructs or mmRNA disclosed herein can be differentiated by one skilled in the art into any cell type or lineage. The cells can be of a lineage such as, but not limited to, endodermal lineage, ecotodermal lineage and mesodermal lineage. Cells of endodermal lineage include, but are not limited to, cells of the gastrointestinal system, cells of the respiratory tract, cells of the endocrine glands, cells of the auditory system, and certain cells of the urinary system, such as the bladder and parts of the urethra. Cells of ectodermal lineage include, but are not limited to, ectodermal lineage cells include, but are not limited to, cells of the epidermis (skin cells, melanocytes), and cells of the neuronal lineage. Cells of mesodermal lineage include, but are not limited to, cells of the circulatory system (cardiac cells and blood vessel cells), cells of the connective tissue, bone cells, dermal cells, myocytes (smooth and skeletal), certain cells of the urinary system, such as kidney cells, splenic cells, mesothelial cells (cells of the peritoneum, pleura, and pericardium), non-germ cells of the reproductive system, and hematopoietic lineage cells.

[0145] The success of differentiation using the cell phenotype altering polynucleotides, primary constructs and/or mmRNA may be monitored by analysis of a variety of criteria known in the art such as, but not limited to, expressed cell markers and characterization of morphological features. Other methods for monitoring the success of differentiation are described in International Publication No. WO2011130624; herein incorporated by reference in its entirety.

### Developmental Potential Altering Factor

[0146] The cell phenotype altering polynucleotides, primary constructs and mmRNA may encode a developmental potential altering factor. As used herein, “developmental potential altering factor” refers to a protein or RNA which can alter the developmental potential of a cell. As a non-limiting example, the cell phenotype altering polynucleotides, primary constructs and mmRNA may encode a developmental potential altering factor that can alter a somatic cell to another developmental state such as a pluripotent state.

[0147] A developmental potential altering factor may include, but is not limited to, a reprogramming factor or a transcription factor.

### Transcription Factor

[0148] The cell phenotype altering polynucleotides, primary constructs and mmRNA may encode a transcription factor. As used herein, used herein, the term “transcription factor” refers to a DNA-binding protein that regulates transcription of DNA into RNA, for example, by activation or repression of transcription. Some transcription factors effect regulation of transcription alone, while others act in concert with other proteins. Some transcription factor can both activate and repress transcription under certain conditions. In general, transcription factors bind a specific target sequence or sequences highly similar to a specific consensus sequence in a regulatory region of a target gene. Transcription factors may regulate transcription of a target gene alone or in a complex with other molecules.

### Flanking Regions: Untranslated Regions (UTRs)

[0149] Untranslated regions (UTRs) of a gene are transcribed but not translated. The 5′UTR starts at the transcription start site and continues to the start codon but does not include the start codon; whereas, the 3′UTR starts immediately following the stop codon and continues until the transcriptional termination signal. There is growing body of evidence about the regulatory roles played by the UTRs in terms of stability of the nucleic acid molecule and translation. The regulatory features of a UTR can be incorporated into the cell phenotype altering polynucleotides, primary constructs and/or mmRNA of the present invention to enhance the stability of the molecule. The specific features can also be incorporated to ensure controlled down-regulation of the transcript in case they are misdirected to undesired organs sites.

### 5′ UTR and Translation Initiation

[0150] Natural 5′UTRs bear features which play roles in for translation initiation. They harbor signatures like Kozak sequences which are commonly known to be involved in the process by which the ribosome initiates translation of many genes. Kozak sequences have the consensus CCR(A/G)CCAUGG, where R is a purine (adenine or guanine) three bases upstream of the start codon (AUG), which is followed by another ‘G’. 5′UTR also have been known to form secondary structures which are involved in elongation factor binding.

[0151] By engineering the features typically found in abundantly expressed genes of specific target organs, one can enhance the stability and protein production of the cell phenotype altering polynucleotides, primary constructs or mmRNA of the invention. For example, introduction of 5′ UTR of liver-expressed mRNA, such as albumin, serum amyloid A, Apolipoprotein A/B/E, transferrin, alpha fetoprotein, erythropoietin, or Factor VIII, could be used to enhance expression of a nucleic acid molecule, such as a mmRNA, in hepatic cell lines or liver. Likewise, use of 5′ UTR from other tissue-specific mRNA to improve expression in that tissue is possible—for muscle (MyoD, Myosin, Myoglobin, Myogenin, Herculin), for endothelial cells (Tie-1, CD36), for myeloid cells (C/EBP, AML1, G-CSF, GM-CSF, CD11b, MSR, Fr-1, i-NOS), for leukocytes (CD45, CD18), for adipose tissue (CD36, GLUT4, ACRP30, adiponectin) and for lung epithelial cells (SP-A/B/C/D).

[0152] Other non-UTR sequences may be incorporated into the 5′ (or 3′ UTR) UTRs. For example, introns or portions of introns sequences may be incorporated into the flanking regions of the cell phenotype altering polynucleotides, primary constructs or mmRNA of the invention. Incorporation of intronic sequences may increase protein production as well as mRNA levels.

### 3′ UTR and the AU Rich Elements

[0153] 3′UTRs are known to have stretches of Adenosines and Uridines embedded in them. These AU rich signatures are particularly prevalent in genes with high rates of turnover. Based on their sequence features and functional properties, the AU rich elements (AREs) can be separated into three classes (Chen et al, 1995): Class I AREs contain several dispersed copies of an AUUUA motif within U-rich regions. C-Myc and MyoD contain class I AREs. Class II AREs possess two or more overlapping UUAUUUA(U/A)(U/A) nonamers. Molecules containing this type of AREs include GM-CSF and TNF-a. Class III ARES are less well defined. These U rich regions do not contain an AUUUA motif. c-Jun and Myogenin are two well-studied examples of this class. Most proteins binding to the AREs are known to destabilize the messenger, whereas members of the ELAV family, most notably HuR, have been documented to increase the stability of mRNA. HuR binds to AREs of all the three classes. Engineering the HuR specific binding sites into the 3′ UTR of nucleic acid molecules will lead to HuR binding and thus, stabilization of the message in vivo.

[0154] Introduction, removal or modification of 3′ UTR AU rich elements (AREs) can be used to modulate the stability of cell phenotype altering polynucleotides, primary constructs or mmRNA of the invention. When engineering specific cell phenotype altering polynucleotides, primary constructs or mmRNA, one or more copies of an ARE can be introduced to make cell phenotype altering polynucleotides, primary constructs or mmRNA of the invention less stable and thereby curtail translation and decrease production of the resultant protein. Likewise, AREs can be identified and removed or mutated to increase the intracellular stability and thus increase translation and production of the resultant protein. Transfection experiments can be conducted in relevant cell lines, using cell phenotype altering polynucleotides, primary constructs or mmRNA of the invention and protein production can be assayed at various time points post-transfection. For example, cells can be transfected with different ARE-engineering molecules and by using an ELISA kit to the relevant protein and assaying protein produced at 6 hr, 12 hr, 24 hr, 48 hr, and 7 days post-transfection.

Incorporating microRNA Binding Sites

[0155] microRNAs (or miRNA) are 19-25 nucleotide long noncoding RNAs that bind to the 3′UTR of nucleic acid molecules and down-regulate gene expression either by reducing nucleic acid molecule stability or by inhibiting translation. The polynucleotides, primary constructs or mmRNA of the invention may comprise one or more microRNA target sequences, microRNA sequences, or microRNA seeds. Such sequences may correspond to any known microRNA such as those taught in US Publication US2005/0261218 and US Publication US2005/0059005, the contents of which are incorporated herein by reference in their entirety.

[0156] A microRNA sequence comprises a “seed” region, i.e., a sequence in the region of positions 2-8 of the mature microRNA, which sequence has perfect Watson-Crick complementarity to the miRNA target sequence. A microRNA seed may comprise positions 2-8 or 2-7 of the mature microRNA. In some embodiments, a microRNA seed may comprise 7 nucleotides (e.g., nucleotides 2-8 of the mature microRNA), wherein the seed-complementary site in the corresponding miRNA target is flanked by an adenine (A) opposed to microRNA position 1. In some embodiments, a microRNA seed may comprise 6 nucleotides (e.g., nucleotides 2-7 of the mature microRNA), wherein the seed-complementary site in the corresponding miRNA target is flanked by an adenine (A) opposed to microRNA position 1. See for example, Grimson A, Farh K K, Johnston W K, Garrett-Engele P, Lim L P, Bartel D P; Mol Cell. 2007 Jul. 6; 27(1):91-105. The bases of the microRNA seed have complete complementarity with the target sequence. By engineering microRNA target sequences into the 3′UTR of cell phenotype altering polynucleotides, primary constructs or mmRNA of the invention one can target the molecule for degradation or reduced translation, provided the microRNA in question is available. This process will reduce the hazard of off target effects upon nucleic acid molecule delivery. Identification of microRNA, microRNA target regions, and their expression patterns and role in biology have been reported (Bonauer et al., Curr Drug Targets 2010 11:943-949; Anand and Cheresh Curr Opin Hematol 2011 18:171-176; Contreras and Rao Leukemia 2012 26:404-413 (2011 Dec. 20. doi: 10.1038/leu.2011.356); Bartel Cell 2009 136:215-233; Landgraf et al, Cell, 2007 129:1401-1414).

[0157] For example, if the nucleic acid molecule is an mRNA and is not intended to be delivered to the liver but ends up there, then miR-122, a microRNA abundant in liver, can inhibit the expression of the gene of interest if one or multiple target sites of miR-122 are engineered into the 3′UTR of the polynucleotides, primary constructs or mmRNA. Introduction of one or multiple binding sites for different microRNA can be engineered to further decrease the longevity, stability, and protein translation of a polynucleotides, primary constructs or mmRNA.

[0158] As used herein, the term “microRNA site” refers to a microRNA target site or a microRNA recognition site, or any nucleotide sequence to which a microRNA binds or associates. It should be understood that “binding” may follow traditional Watson-Crick hybridization rules or may reflect any stable association of the microRNA with the target sequence at or adjacent to the microRNA site.

[0159] Conversely, for the purposes of the cell phenotype altering polynucleotides, primary constructs or mmRNA of the present invention, microRNA binding sites can be engineered out of (i.e. removed from) sequences in which they naturally occur in order to increase protein expression in specific tissues. For example, miR-122 binding sites may be removed to improve protein expression in the liver. Regulation of expression in multiple tissues can be accomplished through introduction or removal or one or several microRNA binding sites.

[0160] Examples of tissues where microRNA are known to regulate mRNA, and thereby protein expression, include, but are not limited to, liver (miR-122), muscle (miR-133, miR-206, miR-208), endothelial cells (miR-17-92, miR-126), myeloid cells (miR-142-3p, miR-142-5p, miR-16, miR-21, miR-223, miR-24, miR-27), adipose tissue (let-7, miR-30c), heart (miR-1d, miR-149), kidney (miR-192, miR-194, miR-204), and lung epithelial cells (let-7, miR-133, miR-126). MicroRNA can also regulate complex biological processes such as angiogenesis (miR-132) (Anand and Cheresh Curr Opin Hematol 2011 18:171-176). In the cell phenotype altering polynucleotides, primary constructs or mmRNA of the invention, binding sites for microRNAs that are involved in such processes may be removed or introduced, in order to tailor the expression of the cell phenotype altering polynucleotides, primary constructs or mmRNA expression to biologically relevant cell types or to the context of relevant biological processes.

[0161] Lastly, through an understanding of the expression patterns of microRNA in different cell types, cell phenotype altering polynucleotides, primary constructs or mmRNA can be engineered for more targeted expression in specific cell types or only under specific biological conditions. Through introduction of tissue-specific microRNA binding sites, cell phenotype altering polynucleotides, primary constructs or mmRNA could be designed that would be optimal for protein expression in a tissue or in the context of a biological condition.

[0162] Transfection experiments can be conducted in relevant cell lines, using engineered cell phenotype altering polynucleotides, primary constructs or mmRNA and protein production can be assayed at various time points post-transfection. For example, cells can be transfected with different microRNA binding site-engineering cell phenotype altering polynucleotides, primary constructs or mmRNA and by using an ELISA kit to the relevant protein and assaying protein produced at 6 hr, 12 hr, 24 hr, 48 hr, 72 hr and 7 days post-transfection. In vivo experiments can also be conducted using microRNA-binding site-engineered molecules to examine changes in tissue-specific expression of formulated cell phenotype altering polynucleotides, primary constructs or mmRNA.

### 5′ Capping

[0163] The 5′ cap structure of an mRNA is involved in nuclear export, increasing mRNA stability and binds the mRNA Cap Binding Protein (CBP), which is responsible for mRNA stability in the cell and translation competency through the association of CBP with poly(A) binding protein to form the mature cyclic mRNA species. The cap further assists the removal of 5′ proximal introns removal during mRNA splicing.

[0164] Endogenous mRNA molecules may be 5′-end capped generating a 5′-ppp-5′-triphosphate linkage between a terminal guanosine cap residue and the 5′-terminal transcribed sense nucleotide of the mRNA molecule. This 5′-guanylate cap may then be methylated to generate an N7-methyl-guanylate residue. The ribose sugars of the terminal and/or anteterminal transcribed nucleotides of the 5′ end of the mRNA may optionally also be 2′-O-methylated. 5′-decapping through hydrolysis and cleavage of the guanylate cap structure may target a nucleic acid molecule, such as an mRNA molecule, for degradation.

[0165] Modifications to the cell phenotype altering polynucleotides, primary constructs, and mmRNA of the present invention may generate a non-hydrolyzable cap structure preventing decapping and thus increasing mRNA half-life. Because cap structure hydrolysis requires cleavage of 5′-ppp-5′ phosphorodiester linkages, modified nucleotides may be used during the capping reaction. For example, a Vaccinia Capping Enzyme from New England Biolabs (Ipswich, Mass.) may be used with α-thio-guanosine nucleotides according to the manufacturer's instructions to create a phosphorothioate linkage in the 5′-ppp-5′ cap. Additional modified guanosine nucleotides may be used such as α-methyl-phosphonate and seleno-phosphate nucleotides.

[0166] Additional modifications include, but are not limited to, 2′-O-methylation of the ribose sugars of 5′-terminal and/or 5′-anteterminal nucleotides of the mRNA (as mentioned above) on the 2′-hydroxyl group of the sugar ring. Multiple distinct 5′-cap structures can be used to generate the 5′-cap of a nucleic acid molecule, such as an mRNA molecule.

[0167] Cap analogs, which herein are also referred to as synthetic cap analogs, chemical caps, chemical cap analogs, or structural or functional cap analogs, differ from natural (i.e. endogenous, wild-type or physiological) 5′-caps in their chemical structure, while retaining cap function. Cap analogs may be chemically (i.e. non-enzymatically) or enzymatically synthesized and/linked to a nucleic acid molecule.

[0168] For example, the Anti-Reverse Cap Analog (ARCA) cap contains two guanines linked by a 5′-5′-triphosphate group, wherein one guanine contains an N7 methyl group as well as a 3′-O-methyl group (i.e., N7,3′-O-dimethyl-guanosine-5′-triphosphate-5′-guanosine (m⁷G-3′mppp-G; which may equivalently be designated 3′O-Me-m7G(5′)ppp(5′)G). The 3′-O atom of the other, unmodified, guanine becomes linked to the 5′-terminal nucleotide of the capped nucleic acid molecule (e.g. an mRNA or mmRNA). The N7- and 3′-O-methlyated guanine provides the terminal moiety of the capped nucleic acid molecule (e.g. mRNA or mmRNA).

[0169] Another exemplary cap is mCAP, which is similar to ARCA but has a 2′-O-methyl group on guanosine (i.e., N7,2′-O-dimethyl-guanosine-5′-triphosphate-5′-guanosine, m⁷Gm-ppp-G).

[0170] While cap analogs allow for the concomitant capping of a nucleic acid molecule in an in vitro transcription reaction, up to 20% of transcripts remain uncapped. This, as well as the structural differences of a cap analog from an endogenous 5′-cap structure of nucleic acids produced by the endogenous, cellular transcription machinery, may lead to reduced translational competency and reduced cellular stability.

[0171] Cell phenotype altering polynucleotides, primary constructs and mmRNA of the invention may also be capped post-transcriptionally, using enzymes, in order to generate more authentic 5′-cap structures. As used herein, the phrase “more authentic” refers to a feature that closely mirrors or mimics, either structurally or functionally, an endogenous or wild type feature. That is, a “more authentic” feature is better representative of an endogenous, wild-type, natural or physiological cellular function and/or structure as compared to synthetic features or analogs, etc., of the prior art, or which outperforms the corresponding endogenous, wild-type, natural or physiological feature in one or more respects. Non-limiting examples of more authentic 5′cap structures of the present invention are those which, among other things, have enhanced binding of cap binding proteins, increased half life, reduced susceptibility to 5′ endonucleases and/or reduced 5′decapping, as compared to synthetic 5′cap structures known in the art (or to a wild-type, natural or physiological 5′cap structure). For example, recombinant Vaccinia Virus Capping Enzyme and recombinant 2′-O-methyltransferase enzyme can create a canonical 5′-5′-triphosphate linkage between the 5′-terminal nucleotide of an mRNA and a guanine cap nucleotide wherein the cap guanine contains an N7 methylation and the 5′-terminal nucleotide of the mRNA contains a 2′-O-methyl. Such a structure is termed the Cap1 structure. This cap results in a higher translational-competency and cellular stability and a reduced activation of cellular pro-inflammatory cytokines, as compared, e.g., to other 5′cap analog structures known in the art. Cap structures include 7mG(5′)ppp(5′)N,pN2p (cap 0), 7mG(5′)ppp(5′)NlmpNp (cap 1), and 7mG(5′)-ppp(5′)NlmpN2mp (cap 2).

[0172] Because the cell phenotype altering polynucleotides, primary constructs or mmRNA may be capped post-transcriptionally, and because this process is more efficient, nearly 100% of the cell phenotype altering polynucleotides, primary constructs or mmRNA may be capped. This is in contrast to ˜80% when a cap analog is linked to an mRNA in the course of an in vitro transcription reaction.

[0173] According to the present invention, 5′ terminal caps may include endogenous caps or cap analogs. According to the present invention, a 5′ terminal cap may comprise a guanine analog. Useful guanine analogs include inosine, N1-methyl-guanosine, 2′fluoro-guanosine, 7-deaza-guanosine, 8-oxo-guanosine, 2-amino-guanosine, LNA-guanosine, and 2-azido-guanosine.

### Viral Sequences

[0174] Additional viral sequences such as, but not limited to, the translation enhancer sequence of the barley yellow dwarf virus (BYDV-PAV) can be engineered and inserted in the 3′ UTR of the cell phenotype altering polynucleotides, primary constructs or mmRNA of the invention and can stimulate the translation of the construct in vitro and in vivo. Transfection experiments can be conducted in relevant cell lines at and protein production can be assayed by ELISA at 12 hr, 24 hr, 48 hr, 72 hr and day 7 post-transfection.

### IRES Sequences

[0175] Further, provided are cell phenotype altering polynucleotides, primary constructs or mmRNA which may contain an internal ribosome entry site (IRES). First identified as a feature Picorna virus RNA, IRES plays an important role in initiating protein synthesis in absence of the 5′ cap structure. An IRES may act as the sole ribosome binding site, or may serve as one of multiple ribosome binding sites of an mRNA. Cell phenotype altering polynucleotides, primary constructs or mmRNA containing more than one functional ribosome binding site may encode several cell phenotype altering peptides or polypeptides that are translated independently by the ribosomes (“multicistronic nucleic acid molecules”). When cell phenotype altering polynucleotides, primary constructs or mmRNA are provided with an IRES, further optionally provided is a second translatable region. Examples of IRES sequences that can be used according to the invention include without limitation, those from picornaviruses (e.g. FMDV), pest viruses (CFFV), polio viruses (PV), encephalomyocarditis viruses (ECMV), foot-and-mouth disease viruses (FMDV), hepatitis C viruses (HCV), classical swine fever viruses (CSFV), murine leukemia virus (MLV), simian immune deficiency viruses (SIV) or cricket paralysis viruses (CrPV).

### Poly-A Tails

[0176] During RNA processing, a long chain of adenine nucleotides (poly-A tail) may be added to a polynucleotide such as an mRNA molecules in order to increase stability. Immediately after transcription, the 3′ end of the transcript may be cleaved to free a 3′ hydroxyl. Then poly-A polymerase adds a chain of adenine nucleotides to the RNA. The process, called polyadenylation, adds a poly-A tail that can be between 100 and 250 residues long.

[0177] It has been discovered that unique poly-A tail lengths provide certain advantages to the cell phenotype altering polynucleotides, primary constructs or mmRNA of the present invention.

[0178] Generally, the length of a poly-A tail of the present invention is greater than 30 nucleotides in length. In another embodiment, the poly-A tail is greater than 35 nucleotides in length (e.g., at least or greater than about 35, 40, 45, 50, 55, 60, 70, 80, 90, 100, 120, 140, 160, 180, 200, 250, 300, 350, 400, 450, 500, 600, 700, 800, 900, 1,000, 1,100, 1,200, 1,300, 1,400, 1,500, 1,600, 1,700, 1,800, 1,900, 2,000, 2,500, and 3,000 nucleotides). In some embodiments, the polynucleotide, primary construct, or mmRNA includes from about 30 to about 3,000 nucleotides (e.g., from 30 to 50, from 30 to 100, from 30 to 250, from 30 to 500, from 30 to 750, from 30 to 1,000, from 30 to 1,500, from 30 to 2,000, from 30 to 2,500, from 50 to 100, from 50 to 250, from 50 to 500, from 50 to 750, from 50 to 1,000, from 50 to 1,500, from 50 to 2,000, from 50 to 2,500, from 50 to 3,000, from 100 to 500, from 100 to 750, from 100 to 1,000, from 100 to 1,500, from 100 to 2,000, from 100 to 2,500, from 100 to 3,000, from 500 to 750, from 500 to 1,000, from 500 to 1,500, from 500 to 2,000, from 500 to 2,500, from 500 to 3,000, from 1,000 to 1,500, from 1,000 to 2,000, from 1,000 to 2,500, from 1,000 to 3,000, from 1,500 to 2,000, from 1,500 to 2,500, from 1,500 to 3,000, from 2,000 to 3,000, from 2,000 to 2,500, and from 2,500 to 3,000).

[0179] In one embodiment, the poly-A tail is designed relative to the length of the overall cell phenotype altering polynucleotides, primary constructs or mmRNA. This design may be based on the length of the coding region, the length of a particular feature or region (such as the first or flanking regions), or based on the length of the ultimate product expressed from the cell phenotype altering polynucleotides, primary constructs or mmRNA.

[0180] In this context the poly-A tail may be 10, 20, 30, 40, 50, 60, 70, 80, 90, or 100% greater in length than the cell phenotype altering polynucleotides, primary constructs or mmRNA or feature thereof. The poly-A tail may also be designed as a fraction of cell phenotype altering polynucleotides, primary constructs or mmRNA to which it belongs. In this context, the poly-A tail may be 10, 20, 30, 40, 50, 60, 70, 80, or 90% or more of the total length of the cell phenotype altering construct or the total length of the cell phenotype altering construct minus the poly-A tail. Further, engineered binding sites and conjugation of cell phenotype altering polynucleotides, primary constructs or mmRNA for Poly-A binding protein may enhance expression.

[0181] Additionally, multiple distinct cell phenotype altering polynucleotides, primary constructs or mmRNA may be linked together to the PABP (Poly-A binding protein) through the 3′-end using modified nucleotides at the 3′-terminus of the poly-A tail. Transfection experiments can be conducted in relevant cell lines at and protein production can be assayed by ELISA at 12 hr, 24 hr, 48 hr, 72 hr and day 7 post-transfection.

[0182] In one embodiment, the cell phenotype altering polynucleotide primary constructs of the present invention are designed to include a polyA-G Quartet. The G-quartet is a cyclic hydrogen bonded array of four guanine nucleotides that can be formed by G-rich sequences in both DNA and RNA. In this embodiment, the G-quartet is incorporated at the end of the poly-A tail. The resultant cell phenotype altering mmRNA construct is assayed for stability, protein production and other parameters including half-life at various time points. It has been discovered that the polyA-G quartet results in protein production equivalent to at least 75% of that seen using a poly-A tail of 120 nucleotides alone.

### Quantification

[0183] In one embodiment, the cell phenotype altering polynucleotides, primary constructs or mmRNA of the present invention may be quantified in exosomes derived from one or more bodily fluid. As used herein “bodily fluids” include peripheral blood, serum, plasma, ascites, urine, cerebrospinal fluid (CSF), sputum, saliva, bone marrow, synovial fluid, aqueous humor, amniotic fluid, cerumen, breast milk, broncheoalveolar lavage fluid, semen, prostatic fluid, cowper's fluid or pre-ejaculatory fluid, sweat, fecal matter, hair, tears, cyst fluid, pleural and peritoneal fluid, pericardial fluid, lymph, chyme, chyle, bile, interstitial fluid, menses, pus, sebum, vomit, vaginal secretions, mucosal secretion, stool water, pancreatic juice, lavage fluids from sinus cavities, bronchopulmonary aspirates, blastocyl cavity fluid, and umbilical cord blood. Alternatively, exosomes may be retrieved from an organ selected from the group consisting of lung, heart, pancreas, stomach, intestine, bladder, kidney, ovary, testis, skin, colon, breast, prostate, brain, esophagus, liver, and placenta.

[0184] In the quantification method, a sample of not more than 2 mL is obtained from the subject and the exosomes isolated by size exclusion chromatography, density gradient centrifugation, differential centrifugation, nanomembrane ultrafiltration, immunoabsorbent capture, affinity purification, microfluidic separation, or combinations thereof. In the analysis, the level or concentration of a cell phenotype altering polynucleotide, primary construct or mmRNA may be an expression level, presence, absence, truncation or alteration of the administered construct. It is advantageous to correlate the level with one or more clinical phenotypes or with an assay for a human disease biomarker. The assay may be performed using construct specific probes, cytometry, qRT-PCR, real-time PCR, PCR, flow cytometry, electrophoresis, mass spectrometry, or combinations thereof while the exosomes may be isolated using immunohistochemical methods such as enzyme linked immunosorbent assay (ELISA) methods. Exosomes may also be isolated by size exclusion chromatography, density gradient centrifugation, differential centrifugation, nanomembrane ultrafiltration, immunoabsorbent capture, affinity purification, microfluidic separation, or combinations thereof.

[0185] These methods afford the investigator the ability to monitor, in real time, the level of cell phenotype altering polynucleotides, primary constructs or mmRNA remaining or delivered. This is possible because the cell phenotype altering polynucleotides, primary constructs or mmRNA of the present invention differ from the endogenous forms due to the structural or chemical modifications.

### II. DESIGN AND SYNTHESIS OF MMRNA

[0186] Cell phenotype altering polynucleotides, primary constructs or mmRNA for use in accordance with the invention may be prepared according to any available technique including, but not limited to chemical synthesis, enzymatic synthesis, which is generally termed in vitro transcription (IVT) or enzymatic or chemical cleavage of a longer precursor, etc. Methods of synthesizing RNAs are known in the art (see, e.g., Gait, M. J. (ed.) Oligonucleotide synthesis: a practical approach, Oxford [Oxfordshire], Washington, D.C.: IRL Press, 1984; and Herdewijn, P. (ed.) Oligonucleotide synthesis: methods and applications, Methods in Molecular Biology, v. 288 (Clifton, N.J.) Totowa, N.J.: Humana Press, 2005; both of which are incorporated herein by reference).

[0187] The process of design and synthesis of the cell phenotype altering primary constructs of the invention generally includes the steps of gene construction, mRNA production (either with or without modifications) and purification. In the enzymatic synthesis method, a target cell phenotype altering polynucleotide sequence encoding the cell phenotype altering polypeptide of interest is first selected for incorporation into a vector which will be amplified to produce a cDNA template. Optionally, the target cell phenotype altering polynucleotide sequence and/or any flanking sequences may be codon optimized. The cDNA template is then used to produce mRNA through in vitro transcription (IVT). After production, the mRNA may undergo purification and clean-up processes. The steps of which are provided in more detail below.

### Gene Construction

[0188] The step of gene construction may include, but is not limited to gene synthesis, vector amplification, plasmid purification, plasmid linearization and clean-up, and cDNA template synthesis and clean-up.

### Gene Synthesis

[0189] Once a cell phenotype altering polypeptide of interest, or target, is selected for production, a cell phenotype altering primary construct is designed. Within the cell phenotype altering primary construct, a first region of linked nucleosides encoding the cell phenotype altering polypeptide of interest may be constructed using an open reading frame (ORF) of a selected nucleic acid (DNA or RNA) transcript. The ORF may comprise the wild type ORF, an isoform, variant or a fragment thereof. As used herein, an “open reading frame” or “ORF” is meant to refer to a nucleic acid sequence (DNA or RNA) which is capable of encoding a cell phenotype altering polypeptide of interest. ORFs often begin with the start codon, ATG and end with a nonsense or termination codon or signal.

[0190] Further, the nucleotide sequence of the first region may be codon optimized. Codon optimization methods are known in the art and may be useful in efforts to achieve one or more of several goals. These goals include to match codon frequencies in target and host organisms to ensure proper folding, bias GC content to increase mRNA stability or reduce secondary structures, minimize tandem repeat codons or base runs that may impair gene construction or expression, customize transcriptional and translational control regions, insert or remove protein trafficking sequences, remove/add post translation modification sites in encoded protein (e.g. glycosylation sites), add, remove or shuffle protein domains, insert or delete restriction sites, modify ribosome binding sites and mRNA degradation sites, to adjust translational rates to allow the various domains of the protein to fold properly, or to reduce or eliminate problem secondary structures within the mRNA. Codon optimization tools, algorithms and services are known in the art, non-limiting examples include services from GeneArt (Life Technologies) and/or DNA2.0 (Menlo Park Calif.). In one embodiment, the ORF sequence is optimized using optimization algorithms. Codon options for each amino acid are given in Table 1.

TABLE 1
Codon Options

| | Single | |
|---|---|---|
| | Letter | |
| Amino Acid | Code | Codon Options |
| Isoleucine | I | ATT, ATC, ATA |
| Leucine | L | CTT, CTC, CTA, CTG, TTA, TTG |
| Valine | V | GTT, GTC, GTA, GTG |
| Phenylalanine | F | TTT, TTC |
| Methionine | M | ATG |
| Cysteine | C | TGT, TGC |
| Alanine | A | GCT, GCC, GCA, GCG |
| Glycine | G | GGT, GGC, GGA, GGG |
| Proline | P | CCT, CCC, CCA, CCG |
| Threonine | T | ACT, ACC, ACA, ACG |
| Serine | S | TCT, TCC, TCA, TCG, AGT, AGC |
| Tyrosine | Y | TAT, TAC |
| Tryptophan | W | TGG |
| Glutamine | Q | CAA, CAG |
| Asparagine | N | AAT, AAC |
| Histidine | H | CAT, CAC |
| Glutamic acid | E | GAA, GAG |
| Aspartic acid | D | GAT, GAC |
| Lysine | K | AAA, AAG |
| Arginine | R | CGT, CGC, CGA, CGG, AGA, AGG |
| Selenocysteine | Sec | UGA in mRNA in presence of Selenocystein |
| | | insertion element (SECIS) |
| Stop codons | Stop | TAA, TAG, TGA |

[0191] In one embodiment, after a nucleotide sequence has been codon optimized it may be further evaluated for regions containing restriction sites. At least one nucleotide within the restriction site regions may be replaced with another nucleotide in order to remove the restriction site from the sequence but the replacement of nucleotides does alter the amino acid sequence which is encoded by the codon optimized nucleotide sequence.

[0192] Features, which may be considered beneficial in some embodiments of the present invention, may be encoded by the cell phenotype altering primary construct and may flank the ORF as a first or second flanking region. The flanking regions may be incorporated into the cell phenotype altering primary construct before and/or after optimization of the ORF. It is not required that a cell phenotype altering primary construct contain both a 5′ and 3′ flanking region. Examples of such features include, but are not limited to, untranslated regions (UTRs), Kozak sequences, an oligo(dT) sequence, and detectable tags and may include multiple cloning sites which may have XbaI recognition.

[0193] In some embodiments, a 5′ UTR and/or a 3′ UTR may be provided as flanking regions. Multiple 5′ or 3′ UTRs may be included in the flanking regions and may be the same or of different sequences. Any portion of the flanking regions, including none, may be codon optimized and any may independently contain one or more different structural or chemical modifications, before and/or after codon optimization. Combinations of features may be included in the first and second flanking regions and may be contained within other features. For example, the ORF may be flanked by a 5′ UTR which may contain a strong Kozak translational initiation signal and/or a 3′ UTR which may include an oligo(dT) sequence for templated addition of a poly-A tail.

[0194] Tables 2 and 3 provide a listing of exemplary UTRs which may be utilized in the cell phenotype altering primary construct of the present invention as flanking regions. Shown in Table 2 is a representative listing of a 5′-untranslated region of the invention. Variants of 5′ UTRs may be utilized wherein one or more nucleotides are added or removed to the termini, including A, T, C or G.

TABLE 2
5′-Untranslated Regions

| | | | SEQ |
|---|---|---|---|
| 5′ UTR | Name/ | | ID |
| Identifier | Description | Sequence | NO. |
| 5UTR-001 | Upstream UTR | GGGAAATAAGAGAGAAAAGAAG | 1 |
| | | AGTAAGAAGAAATATAAGAGCC | |
| | | ACC | |

[0195] Shown in Table 3 is a representative listing of 3′-untranslated regions of the invention. Variants of 3′ UTRs may be utilized wherein one or more nucleotides are added or removed to the termini, including A, T, C or G.

TABLE 3
3′-Untranslated Regions

| 3′ UTR | | | SEQ ID |
|---|---|---|---|
| Identifier | Name/Description | Sequence | NO. |
| 3UTR-001 | Creatine | GCGCCTGCCCACCTGCCACCGACTGCTGGAAC | 2 |
| | Kinase | CCAGCCAGTGGGAGGGCCTGGCCCACCAGAGT | |
| | | CCTGCTCCCTCACTCCTCGCCCCGCCCCCTGTC | |
| | | CCAGAGTCCCACCTGGGGGCTCTCTCCACCCTT | |
| | | CTCAGAGTTCCAGTTTCAACCAGAGTTCCAACC | |
| | | AATGGGCTCCATCCTCTGGATTCTGGCCAATGA | |
| | | AATATCTCCCTGGCAGGGTCCTCTTCTTTTCCC | |
| | | AGAGCTCCACCCCAACCAGGAGCTCTAGTTAA | |
| | | TGGAGAGCTCCCAGCACACTCGGAGCTTGTGC | |
| | | TTTGTCTCCACGCAAAGCGATAAATAAAAGCA | |
| | | TTGGTGGCCTTTGGTCTTTGAATAAAGCCTGAG | |
| | | TAGGAAGTCTAGA | |
| 3UTR-002 | Myoglobin | GCCCCTGCCGCTCCCACCCCCACCCATCTGGGC | 3 |
| | | CCCGGGTTCAAGAGAGAGCGGGGTCTGATCTC | |
| | | GTGTAGCCATATAGAGTTTGCTTCTGAGTGTCT | |
| | | GCTTTGTTTAGTAGAGGTGGGCAGGAGGAGCT | |
| | | GAGGGGCTGGGGCTGGGGTGTTGAAGTTGGCT | |
| | | TTGCATGCCCAGCGATGCGCCTCCCTGTGGGAT | |
| | | GTCATCACCCTGGGAACCGGGAGTGGCCCTTG | |
| | | GCTCACTGTGTTCTGCATGGTTTGGATCTGAAT | |
| | | TAATTGTCCTTTCTTCTAAATCCCAACCGAACT | |
| | | TCTTCCAACCTCCAAACTGGCTGTAACCCCAAA | |
| | | TCCAAGCCATTAACTACACCTGACAGTAGCAA | |
| | | TTGTCTGATTAATCACTGGCCCCTTGAAGACAG | |
| | | CAGAATGTCCCTTTGCAATGAGGAGGAGATCT | |
| | | GGGCTGGGCGGGCCAGCTGGGGAAGCATTTGA | |
| | | CTATCTGGAACTTGTGTGTGCCTCCTCAGGTAT | |
| | | GGCAGTGACTCACCTGGTTTTAATAAAACAAC | |
| | | CTGCAACATCTCATGGTCTTTGAATAAAGCCTG | |
| | | AGTAGGAAGTCTAGA | |
| 3UTR-003 | α-actin | ACACACTCCACCTCCAGCACGCGACTTCTCAG | 4 |
| | | GACGACGAATCTTCTCAATGGGGGGGCGGCTG | |
| | | AGCTCCAGCCACCCCGCAGTCACTTTCTTTGTA | |
| | | ACAACTTCCGTTGCTGCCATCGTAAACTGACAC | |
| | | AGTGTTTATAACGTGTACATACATTAACTTATT | |
| | | ACCTCATTTTGTTATTTTTCGAAACAAAGCCCT | |
| | | GTGGAAGAAAATGGAAAACTTGAAGAAGCATT | |
| | | AAAGTCATTCTGTTAAGCTGCGTAAATGGTCTT | |
| | | TGAATAAAGCCTGAGTAGGAAGTCTAGA | |
| 3UTR-004 | Albumin | CATCACATTTAAAAGCATCTCAGCCTACCATG | 5 |
| | | AGAATAAGAGAAAGAAAATGAAGATCAAAAG | |
| | | CTTATTCATCTGTTTTTCTTTTTCGTTGGTGTAA | |
| | | AGCCAACACCCTGTCTAAAAAACATAAATTTC | |
| | | TTTAATCATTTTGCCTCTTTTCTCTGTGCTTCAA | |
| | | TTAATAAAAAATGGAAAGAATCTAATAGAGTG | |
| | | GTACAGCACTGTTATTTTTCAAAGATGTGTTGC | |
| | | TATCCTGAAAATTCTGTAGGTTCTGTGGAAGTT | |
| | | CCAGTGTTCTCTCTTATTCCACTTCGGTAGAGG | |
| | | ATTTCTAGTTTCTTGTGGGCTAATTAAATAAAT | |
| | | CATTAATACTCTTCTAATGGTCTTTGAATAAAG | |
| | | CCTGAGTAGGAAGTCTAGA | |
| 3UTR-005 | α-globin | GCTGCCTTCTGCGGGGCTTGCCTTCTGGCCATG | 6 |
| | | CCCTTCTTCTCTCCCTTGCACCTGTACCTCTTGG | |
| | | TCTTTGAATAAAGCCTGAGTAGGAAGGCGGCC | |
| | | GCTCGAGCATGCATCTAGA | |
| 3UTR-006 | G-CSF | GCCAAGCCCTCCCCATCCCATGTATTTATCTCT | 7 |
| | | ATTTAATATTTATGTCTATTTAAGCCTCATATTT | |
| | | AAAGACAGGGAAGAGCAGAACGGAGCCCCAG | |
| | | GCCTCTGTGTCCTTCCCTGCATTTCTGAGTTTC | |
| | | ATTCTCCTGCCTGTAGCAGTGAGAAAAAGCTC | |
| | | CTGTCCTCCCATCCCCTGGACTGGGAGGTAGAT | |
| | | AGGTAAATACCAAGTATTTATTACTATGACTGC | |
| | | TCCCCAGCCCTGGCTCTGCAATGGGCACTGGG | |
| | | ATGAGCCGCTGTGAGCCCCTGGTCCTGAGGGT | |
| | | CCCCACCTGGGACCCTTGAGAGTATCAGGTCT | |
| | | CCCACGTGGGAGACAAGAAATCCCTGTTTAAT | |
| | | ATTTAAACAGCAGTGTTCCCCATCTGGGTCCTT | |
| | | GCACCCCTCACTCTGGCCTCAGCCGACTGCAC | |
| | | AGCGGCCCCTGCATCCCCTTGGCTGTGAGGCC | |
| | | CCTGGACAAGCAGAGGTGGCCAGAGCTGGGA | |
| | | GGCATGGCCCTGGGGTCCCACGAATTTGCTGG | |
| | | GGAATCTCGTTTTTCTTCTTAAGACTTTTGGGA | |
| | | CATGGTTTGACTCCCGAACATCACCGACGCGT | |
| | | CTCCTGTTTTTCTGGGTGGCCTCGGGACACCTG | |
| | | CCCTGCCCCCACGAGGGTCAGGACTGTGACTC | |
| | | TTTTTAGGGCCAGGCAGGTGCCTGGACATTTGC | |
| | | CTTGCTGGACGGGGACTGGGGATGTGGGAGGG | |
| | | AGCAGACAGGAGGAATCATGTCAGGCCTGTGT | |
| | | GTGAAAGGAAGCTCCACTGTCACCCTCCACCT | |
| | | CTTCACCCCCCACTCACCAGTGTCCCCTCCACT | |
| | | GTCACATTGTAACTGAACTTCAGGATAATAAA | |
| | | GTGTTTGCCTCCATGGTCTTTGAATAAAGCCTG | |
| | | AGTAGGAAGGCGGCCGCTCGAGCATGCATCTA | |
| | | GA | |

[0196] It should be understood that those listed in the previous tables are examples and that any UTR from any gene may be incorporated into the respective first or second flanking region of the cell phenotype altering primary construct. Furthermore, multiple wild-type UTRs of any known gene may be utilized. It is also within the scope of the present invention to provide artificial UTRs which are not variants of wild type genes. These UTRs or portions thereof may be placed in the same orientation as in the transcript from which they were selected or may be altered in orientation or location. Hence a 5′ or 3′ UTR may be inverted, shortened, lengthened, made chimeric with one or more other 5′ UTRs or 3′ UTRs. As used herein, the term “altered” as it relates to a UTR sequence, means that the UTR has been changed in some way in relation to a reference sequence. For example, a 3′ or 5′ UTR may be altered relative to a wild type or native UTR by the change in orientation or location as taught above or may be altered by the inclusion of additional nucleotides, deletion of nucleotides, swapping or transposition of nucleotides. Any of these changes producing an “altered” UTR (whether 3′ or 5′) comprise a variant UTR.

[0197] In one embodiment, the UTRs which may be contemplated by the present invention include the UTRs described in U.S. patent application Ser. No. 14/043,927, filed Oct. 2, 2013, entitled Terminally Modified RNA, U.S. Provisional Patent Application No. 61/775,509, filed Mar. 9, 2013, entitled Heterologous Untranslated Regions for mRNA and U.S. Provisional Patent Application No. 61/829,372, filed May 31, 2013, entitled Heterologous Untranslated Regions for mRNA, the contents of each of which is herein incorporated by reference in its entirety. Non-limiting examples of UTRs include the 5′UTRs described in Table 6, Table 38, Table 41, Table 60, Table 62 and the 3′UTRs described in Table 7 of U.S. patent application Ser. No. 14/043,927, filed Oct. 2, 2013, entitled Terminally Modified RNA, the 5′UTRs described in Table 2 and Table 21 and the 3′UTRs described in Table 3 of U.S. Provisional Patent Application No. 61/775,509, filed Mar. 9, 2013, entitled Heterologous Untranslated Regions for mRNA and the 5′UTRs described in Table 2, Table 21 and Table 22 and the 3′UTRs described in Table 3 of U.S. Provisional Patent Application No. 61/829,372, filed May 31, 2013, entitled Heterologous Untranslated Regions for mRNA, the contents of each of which is herein incorporated by reference in its entirety.

[0198] In one embodiment, a flanking region such as a UTR may comprise a terminal modification. Non-limiting examples of terminal modifications include the terminal modifications described in U.S. patent application Ser. No. 14/043,927, filed Oct. 2, 2013, entitled Terminally Modified RNA, the contents of which is herein incorporated by reference in its entirety, such as the terminal modifications described on pages 35-94 of the specification of U.S. patent application Ser. No. 14/043,927.

[0199] In one embodiment, a double, triple or quadruple UTR such as a 5′ or 3′ UTR may be used. As used herein, a “double” UTR is one in which two copies of the same UTR are encoded either in series or substantially in series. For example, a double beta-globin 3′ UTR may be used as described in US Patent publication 20100129877, the contents of which are incorporated herein by reference in its entirety.

[0200] It is also within the scope of the present invention to have patterned UTRs. As used herein “patterned UTRs” are those UTRs which reflect a repeating or alternating pattern, such as ABABAB or AABBAABBAABB or ABCABCABC or variants thereof repeated once, twice, or more than 3 times. In these patterns, each letter, A, B, or C represent a different UTR at the nucleotide level.

[0201] In one embodiment, flanking regions are selected from a family of transcripts whose proteins share a common function, structure, feature of property. For example, cell phenotype altering polypeptides of interest may belong to a family of proteins which are expressed in a particular cell, tissue or at some time during development. The UTRs from any of these genes may be swapped for any other UTR of the same or different family of proteins to create a new chimeric primary transcript. As used herein, a “family of proteins” is used in the broadest sense to refer to a group of two or more cell phenotype altering polypeptides of interest which share at least one function, structure, feature, localization, origin, or expression pattern.

[0202] After optimization (if desired), the cell phenotype altering primary construct components are reconstituted and transformed into a vector such as, but not limited to, plasmids, viruses, cosmids, and artificial chromosomes. For example, the cell phenotype altering optimized construct may be reconstituted and transformed into chemically competent E. coli, yeast, neurospora, maize, drosophila, etc. where high copy plasmid-like or chromosome structures occur by methods described herein.

### Stop Codons

[0203] In one embodiment, the cell phenotype altering primary constructs of the present invention may include at least two stop codons before the 3′ untranslated region (UTR). The stop codon may be selected from TGA, TAA and TAG. In one embodiment, the cell phenotype altering primary constructs of the present invention include the stop codon TGA and one additional stop codon. In a further embodiment the addition stop codon may be TAA.

### Vector Amplification

[0204] The vector containing the cell phenotype altering primary construct is then amplified and the plasmid isolated and purified using methods known in the art such as, but not limited to, a maxi prep using the Invitrogen PURELINK™ HiPure Maxiprep Kit (Carlsbad, Calif.).

### Plasmid Linearization

[0205] The plasmid may then be linearized using methods known in the art such as, but not limited to, the use of restriction enzymes and buffers. The linearization reaction may be purified using methods including, for example Invitrogen's PURELINK™ PCR Micro Kit (Carlsbad, Calif.), and HPLC based purification methods such as, but not limited to, strong anion exchange HPLC, weak anion exchange HPLC, reverse phase HPLC (RP-HPLC), and hydrophobic interaction HPLC (HIC-HPLC) and Invitrogen's standard PURELINK™ PCR Kit (Carlsbad, Calif.). The purification method may be modified depending on the size of the linearization reaction which was conducted. The linearized plasmid is then used to generate cDNA for in vitro transcription (IVT) reactions.

cDNA Template Synthesis

[0206] A cDNA template may be synthesized by having a linearized plasmid undergo polymerase chain reaction (PCR). Table 4 is a listing of primers and probes that may be usefully in the PCR reactions of the present invention. It should be understood that the listing is not exhaustive and that primer-probe design for any amplification is within the skill of those in the art. Probes may also contain chemically modified bases to increase base-pairing fidelity to the target molecule and base-pairing strength. Such modifications may include 5-methyl-Cytidine, 2,6-di-amino-purine, 2′-fluoro, phosphoro-thioate, or locked nucleic acids.

TABLE 4
Primers and Probes

| Primer/ | | | SEQ |
|---|---|---|---|
| Probe | | Hybridization | ID |
| Identifier | Sequence (5′-3′) | target | NO. |
| UFP | TTGGACCCTCGTACAGAAGCTAA | cDNA Template | 8 |
| | TACG | | |
| URP | Tₓ₁₆₀CTTCCTACTCAGGCTTTATTC | cDNA Template | 9 |
| | AAAGACCA | | |
| GBA1 | CCTTGACCTTCTGGAACTTC | Acid | 10 |
| | | glucocerebrosidase | |
| GBA2 | CCAAGCACTGAAACGGATAT | Acid | 11 |
| | | glucocerebrosidase | |
| LUC1 | GATGAAAAGTGCTCCAAGGA | Luciferase | 12 |
| LUC2 | AACCGTGATGAAAAGGTACC | Luciferase | 13 |
| LUC3 | TCATGCAGATTGGAAAGGTC | Luciferase | 14 |
| GCSF1 | CTTCTTGGACTGTCCAGAGG | G-CSF | 15 |
| GCSF2 | GCAGTCCCTGATACAAGAAC | G-CSF | 16 |
| GCSF3 | GATTGAAGGTGGCTCGCTAC | G-CSF | 17 |

*UFP is universal forward primer; URP is universal reverse primer.

[0207] In one embodiment, the cDNA may be submitted for sequencing analysis before undergoing transcription.

mRNA Production

[0208] The process of mRNA or mmRNA production may include, but is not limited to, in vitro transcription, cDNA template removal and RNA clean-up, and mRNA capping and/or tailing reactions.

### In Vitro Transcription

[0209] The cDNA produced in the previous step may be transcribed using an in vitro transcription (IVT) system. The system typically comprises a transcription buffer, nucleotide triphosphates (NTPs), an RNase inhibitor and a polymerase. The NTPs may be manufactured in house, may be selected from a supplier, or may be synthesized as described herein. The NTPs may be selected from, but are not limited to, those described herein including natural and unnatural (modified) NTPs. The polymerase may be selected from, but is not limited to, T7 RNA polymerase, T3 RNA polymerase and mutant polymerases such as, but not limited to, polymerases able to incorporate modified nucleic acids.

### RNA Polymerases

[0210] Any number of RNA polymerases or variants may be used in the design of the cell phenotype altering primary constructs of the present invention.

[0211] RNA polymerases may be modified by inserting or deleting amino acids of the RNA polymerase sequence. As a non-limiting example, the RNA polymerase may be modified to exhibit an increased ability to incorporate a 2′-modified nucleotide triphosphate compared to an unmodified RNA polymerase (see International Publication WO2008078180 and U.S. Pat. No. 8,101,385; herein incorporated by reference in their entireties).

[0212] Variants may be obtained by evolving an RNA polymerase, optimizing the RNA polymerase amino acid and/or nucleic acid sequence and/or by using other methods known in the art. As a non-limiting example, T7 RNA polymerase variants may be evolved using the continuous directed evolution system set out by Esvelt et al. (Nature (2011) 472(7344):499-503; herein incorporated by reference in its entirety) where clones of T7 RNA polymerase may encode at least one mutation such as, but not limited to, lysine at position 93 substituted for threonine (K93T), I4M, A7T, E63V, V64D, A65E, D66Y, T76N, C125R, S128R, A136T, N165S, G175R, H176L, Y178H, F182L, L196F, G198V, D208Y, E222K, S228A, Q239R, T243N, G259D, M267I, G280C, H300R, D351A, A354S, E356D, L360P, A383V, Y385C, D388Y, S397R, M401T, N410S, K450R, P451T, G452V, E484A, H523L, H524N, G542V, E565K, K577E, K577M, N601S, S684Y, L699I, K713E, N748D, Q754R, E775K, A827V, D851N or L864F. As another non-limiting example, T7 RNA polymerase variants may encode at least mutation as described in U.S. Pub. Nos. 20100120024 and 20070117112; herein incorporated by reference in their entireties. Variants of RNA polymerase may also include, but are not limited to, substitutional variants, conservative amino acid substitution, insertional variants, deletional variants and/or covalent derivatives.

[0213] In one embodiment, the cell phenotype altering primary construct may be designed to be recognized by the wild type or variant RNA polymerases. In doing so, the cell phenotype altering primary construct may be modified to contain sites or regions of sequence changes from the wild type or parent cell phenotype altering primary construct.

[0214] In one embodiment, the cell phenotype altering primary construct may be designed to include at least one substitution and/or insertion upstream of an RNA polymerase binding or recognition site, downstream of the RNA polymerase binding or recognition site, upstream of the TATA box sequence, downstream of the TATA box sequence of the cell phenotype altering primary construct but upstream of the coding region of the cell phenotype altering primary construct, within the 5′UTR, before the 5′UTR and/or after the 5′UTR.

[0215] In one embodiment, the 5′UTR of the cell phenotype altering primary construct may be replaced by the insertion of at least one region and/or string of nucleotides of the same base. The region and/or string of nucleotides may include, but is not limited to, at least 3, at least 4, at least 5, at least 6, at least 7 or at least 8 nucleotides and the nucleotides may be natural and/or unnatural. As a non-limiting example, the group of nucleotides may include 5-8 adenine, cytosine, thymine, a string of any of the other nucleotides disclosed herein and/or combinations thereof.

[0216] In one embodiment, the 5′UTR of the cell phenotype altering primary construct may be replaced by the insertion of at least two regions and/or strings of nucleotides of two different bases such as, but not limited to, adenine, cytosine, thymine, any of the other nucleotides disclosed herein and/or combinations thereof. For example, the 5′UTR may be replaced by inserting 5-8 adenine bases followed by the insertion of 5-8 cytosine bases. In another example, the 5′UTR may be replaced by inserting 5-8 cytosine bases followed by the insertion of 5-8 adenine bases.

[0217] In one embodiment, the cell phenotype altering primary construct may include at least one substitution and/or insertion downstream of the transcription start site which may be recognized by an RNA polymerase. As a non-limiting example, at least one substitution and/or insertion may occur downstream the transcription start site by substituting at least one nucleic acid in the region just downstream of the transcription start site (such as, but not limited to, +1 to +6). Changes to region of nucleotides just downstream of the transcription start site may affect initiation rates, increase apparent nucleotide triphosphate (NTP) reaction constant values, and increase the dissociation of short transcripts from the transcription complex curing initial transcription (Brieba et al, Biochemistry (2002) 41: 5144-5149; herein incorporated by reference in its entirety). The modification, substitution and/or insertion of at least one nucleic acid may cause a silent mutation of the nucleic acid sequence or may cause a mutation in the amino acid sequence.

[0218] In one embodiment, the cell phenotype altering primary construct may include the substitution of at least 1, at least 2, at least 3, at least 4, at least 5, at least 6, at least 7, at least 8, at least 9, at least 10, at least 11, at least 12 or at least 13 guanine bases downstream of the transcription start site.

[0219] In one embodiment, the cell phenotype altering primary construct may include the substitution of at least 1, at least 2, at least 3, at least 4, at least 5 or at least 6 guanine bases in the region just downstream of the transcription start site. As a non-limiting example, if the nucleotides in the region are GGGAGA the guanine bases may be substituted by at least 1, at least 2, at least 3 or at least 4 adenine nucleotides. In another non-limiting example, if the nucleotides in the region are GGGAGA the guanine bases may be substituted by at least 1, at least 2, at least 3 or at least 4 cytosine bases. In another non-limiting example, if the nucleotides in the region are GGGAGA the guanine bases may be substituted by at least 1, at least 2, at least 3 or at least 4 thymine, and/or any of the nucleotides described herein.

[0220] In one embodiment, the cell phenotype altering primary construct may include at least one substitution and/or insertion upstream of the start codon. For the purpose of clarity, one of skill in the art would appreciate that the start codon is the first codon of the protein coding region whereas the transcription start site is the site where transcription begins. The cell phenotype altering primary construct may include, but is not limited to, at least 1, at least 2, at least 3, at least 4, at least 5, at least 6, at least 7 or at least 8 substitutions and/or insertions of nucleotide bases. The nucleotide bases may be inserted or substituted at 1, at least 1, at least 2, at least 3, at least 4 or at least 5 locations upstream of the start codon. The nucleotides inserted and/or substituted may be the same base (e.g., all A or all C or all T or all G), two different bases (e.g., A and C, A and T, or C and T), three different bases (e.g., A, C and T or A, C and T) or at least four different bases. As a non-limiting example, the guanine base upstream of the coding region in the cell phenotype altering primary construct may be substituted with adenine, cytosine, thymine, or any of the nucleotides described herein. In another non-limiting example the substitution of guanine bases in the cell phenotype altering primary construct may be designed so as to leave one guanine base in the region downstream of the transcription start site and before the start codon (see Esvelt et al. Nature (2011) 472(7344):499-503; herein incorporated by reference in its entirety). As a non-limiting example, at least 5 nucleotides may be inserted at 1 location downstream of the transcription start site but upstream of the start codon and the at least 5 nucleotides may be the same base type.

cDNA Template Removal and Clean-Up

[0221] The cDNA template may be removed using methods known in the art such as, but not limited to, treatment with Deoxyribonuclease I (DNase I). RNA clean-up may also include a purification method such as, but not limited to, AGENCOURT® CLEANSEQ® system from Beckman Coulter (Danvers, Mass.), HPLC based purification methods such as, but not limited to, strong anion exchange HPLC, weak anion exchange HPLC, reverse phase HPLC (RP-HPLC), and hydrophobic interaction HPLC (HIC-HPLC).

Capping and/or Tailing Reactions

[0222] The cell phenotype altering primary construct or mmRNA may also undergo capping and/or tailing reactions. A capping reaction may be performed by methods known in the art to add a 5′ cap to the 5′ end of the primary construct. Methods for capping include, but are not limited to, using a Vaccinia Capping enzyme (New England Biolabs, Ipswich, Mass.).

[0223] A poly-A tailing reaction may be performed by methods known in the art, such as, but not limited to, 2′ O-methyltransferase and by methods as described herein. If the cell phenotype altering primary construct generated from cDNA does not include a poly-T, it may be beneficial to perform the poly-A-tailing reaction before the cell phenotype altering primary construct is cleaned.

mRNA Purification

[0224] Cell phenotype altering primary construct or mmRNA purification may include, but is not limited to, mRNA or mmRNA clean-up, quality assurance and quality control. Cell phenotype altering mRNA or mmRNA clean-up may be performed by methods known in the arts such as, but not limited to, AGENCOURT® beads (Beckman Coulter Genomics, Danvers, Mass.), poly-T beads, LNA™ oligo-T capture probes (EXIQON® Inc, Vedbaek, Denmark) or HPLC based purification methods such as, but not limited to, strong anion exchange HPLC, weak anion exchange HPLC, reverse phase HPLC (RP-HPLC), and hydrophobic interaction HPLC (HIC-HPLC). The term “purified” when used in relation to a polynucleotide such as a “purified mRNA or mmRNA” refers to one that is separated from at least one contaminant. As used herein, a “contaminant” is any substance which makes another unfit, impure or inferior. Thus, a purified polynucleotide (e.g., DNA and RNA) is present in a form or setting different from that in which it is found in nature, or a form or setting different from that which existed prior to subjecting it to a treatment or purification method.

[0225] A quality assurance and/or quality control check may be conducted using methods such as, but not limited to, gel electrophoresis, UV absorbance, or analytical HPLC.

[0226] In another embodiment, the mRNA or mmRNA may be sequenced by methods including, but not limited to reverse-transcriptase-PCR.

[0227] In one embodiment, the cell phenotype altering mRNA or mmRNA may be quantified using methods such as, but not limited to, ultraviolet visible spectroscopy (UV/Vis). A non-limiting example of a UV/Vis spectrometer is a NANODROP® spectrometer (ThermoFisher, Waltham, Mass.). The quantified cell phenotype altering mRNA or mmRNA may be analyzed in order to determine if the mRNA or mmRNA may be of proper size, check that no degradation of the cell phenotype altering mRNA or mmRNA has occurred. Degradation of the cell phenotype altering mRNA and/or mmRNA may be checked by methods such as, but not limited to, agarose gel electrophoresis, HPLC based purification methods such as, but not limited to, strong anion exchange HPLC, weak anion exchange HPLC, reverse phase HPLC (RP-HPLC), and hydrophobic interaction HPLC (HIC-HPLC), liquid chromatography-mass spectrometry (LCMS), capillary electrophoresis (CE) and capillary gel electrophoresis (CGE).

### Signal Sequences

[0228] The cell phenotype altering primary constructs or mmRNA may also encode additional features which facilitate trafficking of the polypeptides to therapeutically relevant sites. One such feature which aids in protein trafficking is the signal sequence. As used herein, a “signal sequence” or “signal peptide” is a polynucleotide or polypeptide, respectively, which is from about 9 to 200 nucleotides (3-60 amino acids) in length which is incorporated at the 5′ (or N-terminus) of the coding region or polypeptide encoded, respectively. Addition of these sequences result in trafficking of the encoded cell phenotype altering polypeptide to the endoplasmic reticulum through one or more secretory pathways. Some signal peptides are cleaved from the protein by signal peptidase after the proteins are transported.

[0229] Table 5 is a representative listing of protein signal sequences which may be incorporated for encoding by the cell phenotype altering polynucleotides, primary constructs or mmRNA of the invention.

TABLE 5
Signal Sequences

| | | | SEQ | | |
|---|---|---|---|---|---|
| | | NUCLEOTIDE SEQUENCE | ID | ENCODED | SEQ ID |
| ID | Description | (5′-3′) | NO. | PEPTIDE | NO. |
| SS- | α-1- | ATGATGCCATCCTCAGTCTCATGG | 18 | MMPSSVSWG | 80 |
| 001 | antitrypsin | GGTATTTTGCTCTTGGCGGGTCTG | | ILLAGLCCLV | |
| | | TGCTGTCTCGTGCCGGTGTCGCTC | | PVSLA | |
| | | GCA | | | |
| SS- | G-CSF | ATGGCCGGACCGGCGACTCAGTC | 19 | MAGPATQSP | 81 |
| 002 | | GCCCATGAAACTCATGGCCCTGCA | | MKLMALQLL | |
| | | GTTGTTGCTTTGGCACTCAGCCCT | | LWHSALWTV | |
| | | CTGGACCGTCCAAGAGGCG | | QEA | |
| SS- | Factor IX | ATGCAGAGAGTGAACATGATTAT | 20 | MQRVNMIMA | 82 |
| 003 | | GGCCGAGTCCCCATCGCTCATCAC | | ESPSLITICLL | |
| | | AATCTGCCTGCTTGGTACCTGCTT | | GYLLSAECTV | |
| | | TCCGCCGAATGCACTGTCTTTCTG | | FLDHENANKI | |
| | | GATCACGAGAATGCGAATAAGAT | | LNRPKR | |
| | | CTTGAACCGACCCAAACGG | | | |
| SS- | Prolactin | ATGAAAGGATCATTGCTGTTGCTC | 21 | MKGSLLLLL | 83 |
| 004 | | CTCGTGTCGAACCTTCTGCTTTGC | | VSNLLLCQSV | |
| | | CAGTCCGTAGCCCCC | | AP | |
| SS- | Albumin | ATGAAATGGGTGACGTTCATCTCA | 22 | MKWVTFISLL | 84 |
| 005 | | CTGTTGTTTTTGTTCTCGTCCGCCT | | FLFSSAYSRG | |
| | | ACTCCAGGGGAGTATTCCGCCGA | | VFRR | |
| SS- | HMMSP38 | ATGTGGTGGCGGCTCTGGTGGCTG | 23 | MWWRLWWL | 85 |
| 006 | | CTCCTGTTGCTCCTCTTGCTGTGGC | | LLLLLLLPM | |
| | | CCATGGTGTGGGCA | | WA | |
| MLS- | ornithine | TGCTCTTTAACCTCCGCATCCTGTT | 24 | MLFNLRILLN | 86 |
| 001 | carbamoyl | GAATAACGCTGCGTTCCGAAATG | | NAAFRNGHN | |
| | transferase | GGCATAACTTCATGGTACGCAACT | | FMVRNFRCG | |
| | | TCAGATGCGGCCAGCCACTCCAG | | QPLQ | |
| MLS- | Cytochrome C | ATGTCCGTCTTGACACCCCTGCTC | 25 | MSVLTPLLLR | 87 |
| 002 | Oxidase | TTGAGAGGGCTGACGGGGTCCGC | | GLTGSARRLP | |
| | subunit | TAGACGCCTGCCGGTACCGCGAG | | VPRAKIHSL | |
| | 8A | CGAAGATCCACTCCCTG | | | |
| MLS- | Cytochrome C | ATGAGCGTGCTCACTCCGTTGCTT | 26 | MSVLTPLLLR | 88 |
| 003 | Oxidase | CTTCGAGGGCTTACGGGATCGGCT | | GLTGSARRLP | |
| | subunit | CGGAGGTTGCCCGTCCCGAGAGC | | VPRAKIHSL | |
| | 8A | GAAGATCCATTCGTTG | | | |
| SS- | Type III, | TGACAAAAATAACTTTATCTCCCC | 27 | MVTKITLSPQ | 89 |
| 007 | bacterial | AGAATTTTAGAATCCAAAAACAG | | NFRIQKQETT | |
| | | GAAACCACACTACTAAAAGAAAA | | LLKEKSTEKN | |
| | | ATCAACCGAGAAAAATTCTTTAGC | | SLAKSILAVK | |
| | | AAAAAGTATTCTCGCAGTAAAAA | | NHFIELRSKL | |
| | | TCACTTCATCGAATTAAGGTCAAA | | SERFISHKNT | |
| | | ATTATCGGAACGTTTTATTTCGCA | | | |
| | | TAAGAACACT | | | |
| SS- | Viral | ATGCTGAGCTTTGTGGATA | 28 | MLSFVDTRTL | 90 |
| 008 | | CCCGCACCCTGCTGCTGCTGGCGG | | LLLAVTSCLA | |
| | | TGACCAGCTGCCTGGCGACCTGCC | | TCQ | |
| | | AG | | | |
| SS- | viral | ATGGGCAGCAGCCAGGCG | 29 | MGSSQAPRM | 91 |
| 009 | | CCGCGCATGGGCAGCGTGGGCGG | | GSVGGHGLM | |
| | | CCATGGCCTGATGGCGCTGCTGAT | | ALLMAGLILP | |
| | | GGCGGGCCTGATTCTGCCGGGCAT | | GILA | |
| | | TCTGGCG | | | |
| SS- | Viral | ATGGCGGGCATTTTTTATTTTCTGT | 30 | MAGIFYFLFS | 92 |
| 010 | | TTAGCTTTCTGTTTGGCATTTGCG | | FLFGICD | |
| | | AT | | | |
| SS- | Viral | ATGGAAAACCGCCTGCTGCGCGT | 31 | MENRLLRVF | 93 |
| 011 | | GTTTCTGGTGTGGGCGGCGCTGAC | | LVWAALTMD | |
| | | CATGGATGGCGCGAGCGCG | | GASA | |
| SS- | Viral | ATGGCGCGCCAGGGCTGC | 32 | MARQGCFGS | 94 |
| 012 | | TTTGGCAGCTATCAGGTGATTAGC | | YQVISLFTFAI | |
| | | CTGTTTACCTTTGCGATTGGCGTG | | GVNLCLG | |
| | | AACCTGTGCCTGGGC | | | |
| SS- | Bacillus | ATGAGCCGCCTGCCGGTG | 33 | MSRLPVLLLL | 95 |
| 013 | | CTGCTGCTGCTGCAGCTGCTGGTG | | QLLVRPGLQ | |
| | | CGCCCGGGCCTGCAG | | | |
| SS- | Bacillus | ATGAAACAGCAGAAACGC | 34 | MKQQKRLYA | 96 |
| 014 | | CTGTATGCGCGCCTGCTGACCCTG | | RLLTLLFALIF | |
| | | CTGTTTGCGCTGATTTTTCTGCTGC | | LLPHSSASA | |
| | | CGCATAGCAGCGCGAGCGCG | | | |
| SS- | Secretion | ATGGCGACGCCGCTGCCTCCGCCC | 35 | MATPLPPPSP | 97 |
| 015 | signal | TCCCCGCGGCACCTGCGGCTGCTG | | RHLRLLRLLL | |
| | | CGGCTGCTGCTCTCCGCCCTCGTC | | SG | |
| | | CTCGGC | | | |
| SS- | Secretion | ATGAAGGCTCCGGGTCGGCTCGTG | 36 | MKAPGRLVLI | 98 |
| 016 | signal | CTCATCATCCTGTGCTCCGTGGTC | | ILCSVVFS | |
| | | TTCTCT | | | |
| SS- | Secretion | ATGCTTCAGCTTTGGAAACTTGTT | 37 | MLQLWKLLC | 99 |
| 017 | signal | CTCCTGTGCGGCGTGCTCACT | | GVLT | |
| SS- | Secretion | ATGCTTTATCTCCAGGGTTGGAGC | 38 | MLYLQGWS | 100 |
| 018 | signal | ATGCCTGCTGTGGCA | | MPAVA | |
| SS- | Secretion | ATGGATAACGTGCAGCCGAAAAT | 39 | MDNVQPKIK | 101 |
| 019 | signal | AAAACATCGCCCCTTCTGCTTCAG | | HRPFCFSVKG | |
| | | TGTGAAAGGCCACGTGAAGATGC | | HVKMLRLDII | |
| | | TGCGGCTGGATATTATCAACTCAC | | NSLVTTVFM | |
| | | TGGTAACAACAGTATTCATGCTCA | | LIVSVLALIP | |
| | | TCGTATCTGTGTTGGCACTGATAC | | | |
| | | CA | | | |
| SS- | Secretion | ATGCCCTGCCTAGACCAACAGCTC | 40 | MPCLDQQLT | 102 |
| 020 | signal | ACTGTTCATGCCCTACCCTGCCCT | | VHALPCPAQP | |
| | | GCCCAGCCCTCCTCTCTGGCCTTC | | SSLAFCQVGF | |
| | | TGCCAAGTGGGGTTCTTAACAGCA | | LTA | |
| SS- | Secretion | ATGAAAACCTTGTTCAATCCAGCC | 41 | MKTLFNPAP | 103 |
| 021 | signal | CCTGCCATTGCTGACCTGGATCCC | | AIADLDPQFY | |
| | | CAGTTCTACACCCTCTCAGATGTG | | TLSDVFCCNE | |
| | | TTCTGCTGCAATGAAAGTGAGGCT | | SEAEILTGLT | |
| | | GAGATTTTAACTGGCCTCACGGTG | | VGSAADA | |
| | | GGCAGCGCTGCAGATGCT | | | |
| SS- | Secretion | ATGAAGCCTCTCCTTGTTGTGTTT | 42 | MKPLLVVFV | 104 |
| 022 | signal | GTCTTTCTTTTCCTTTGGGATCCAG | | FLFLWDPVLA | |
| | | TGCTGGCA | | | |
| SS- | Secretion | ATGTCCTGTTCCCTAAAGTTTACT | 43 | MSCSLKFTLI | 105 |
| 023 | signal | TTGATTGTAATTTTTTTTTACTGTT | | VIFFTCTLSSS | |
| | | GGCTTTCATCCAGC | | | |
| SS- | Secretion | ATGGTTCTTACTAAACCTCTTCAA | 44 | MVLTKPLQR | 106 |
| 024 | signal | AGAAATGGCAGCATGATGAGCTT | | NGSMMSFEN | |
| | | TGAAAATGTGAAAGAAAAGAGCA | | VKEKSREGG | |
| | | GAGAAGGAGGGCCCCATGCACAC | | PHAHTPEEEL | |
| | | ACACCCGAAGAAGAATTGTGTTTC | | CFVVTHTPQ | |
| | | GTGGTAACACACTACCCTCAGGTT | | VQTTLNLFFH | |
| | | CAGACCACACTCAACCTGTTTTTC | | IFKVLTQPLS | |
| | | CATATATTCAAGGTTCTTACTCAA | | LLWG | |
| | | CCACTTTCCCTTCTGTGGGGT | | | |
| SS- | Secretion | ATGGCCACCCCGCCATTCCGGCTG | 45 | MATPPFRLIR | 107 |
| 025 | signal | ATAAGGAAGATGTTTTCCTTCAAG | | KMFSFKVSR | |
| | | GTGAGCAGATGGATGGGGCTTGC | | WMGLACFRS | |
| | | CTGCTTCCGGTCCCTGGCGGCATCC | | LAAS | |
| SS- | Secretion | ATGAGCTTTTTCCAACTCCTGATG | 46 | MSFFQLLMK | 108 |
| 026 | signal | AAAAGGAAGGAACTCATTCCCTT | | RKELIPLVVF | |
| | | GGTGGTGTTCATGACTGTGGCGGC | | MTVAAGGASS | |
| | | GGGTGGAGCCTCATCT | | | |
| SS- | Secretion | ATGGTCTCAGCTCTGCGGGGAGCA | 47 | MVSALRGAP | 109 |
| 027 | signal | CCCCTGATCAGGGTGCACTCAAGC | | LIRVHSSPVSS | |
| | | CCTGTTTCTTCTCCTTCTGTGAGTG | | PSVSGPAALV | |
| | | GACCACGGAGGCTGGTGAGCTGC | | SCLSSQSSALS | |
| | | CTGTCATCCCAAAGCTCAGCTCTG | | | |
| | | AGC | | | |
| SS- | Secretion | ATGATGGGGTCCCCAGTGAGTCAT | 48 | MMGSPVSHL | 110 |
| 028 | signal | CTGCTGGCCGGCTTCTGTGTGTGG | | LAGFCVWVV | |
| | | GTCGTCTTGGGC | | LG | |
| SS- | Secretion | ATGGCAAGCATGGCTGCCGTGCTC | 49 | MASMAAVLT | 111 |
| 029 | signal | ACCTGGGCTCTGGCTCTTCTTTCA | | WALALLSAF | |
| | | GCGTTTTCGGCCACCCAGGCA | | SATQA | |
| SS- | Secretion | ATGGTGCTCATGTGGACCAGTGGT | 50 | MVLMWTSG | 112 |
| 030 | signal | GACGCCTTCAAGACGGCCTACTTC | | DAFKTAYFLL | |
| | | CTGCTGAAGGGTGCCCCTCTGCAG | | KGAPLQFSVC | |
| | | TTCTCCGTGTGCGGCCTGCTGCAG | | GLLQVLVDL | |
| | | GTGCTGGTGGACCTGGCCATCCTG | | AILGQATA | |
| | | GGGCAGGCCTACGCC | | | |
| SS- | Secretion | ATGGATTTTGTCGCTGGAGCCATC | 51 | MDFVAGAIG | 113 |
| 031 | signal | GGAGGCGTCTGCGGTGTTGCTGTG | | GVCGVAVGY | |
| | | GGCTACCCCCTGGACACGGTGAA | | PLDTVKVRIQ | |
| | | GGTCAGGATCCAGACGGAGCCAA | | TEPLYTGIWH | |
| | | AGTACACAGGCATCTGGCACTGC | | CVRDTYHRE | |
| | | GTCCGGGATACGTATCACCGAGA | | RVWGFYRGL | |
| | | GCGCGTGTGGG | | SLPVCTVSLV | |
| | | GCTTCTACCGGGGCCTCTCGCTGC | | SS | |
| | | CCGTGTGCACGGTGTCCCTGGTAT | | | |
| | | CTTCC | | | |
| SS- | Secretion | ATGGAGAAGCCCCTCTTCCCATTA | 52 | MEKPLFPLVP | 114 |
| 032 | signal | GTGCCTTTGCATTGGTTTGGCTTT | | LHWFGFGYT | |
| | | GGCTACACAGCACTGGTTGTTTCT | | ALVVSGGIVG | |
| | | GGTGGGATCGTTGGCTATGTAAAA | | YVKTGSVPSL | |
| | | ACAGGCAGCGTGCCGTCCCTGGCT | | AAGLLFGSLA | |
| | | GCAGGGCTGCTCTTCGGCAGTCTA | | | |
| | | GCC | | | |
| SS- | Secretion | ATGGGTCTGCTCCTTCCCCTGGCA | 53 | MGLLLPLAL | 115 |
| 033 | signal | CTCTGCATCCTAGTCCTGTGC | | CILVLC | |
| SS- | Secretion | ATGGGGATCCAGACGAGCCCCGT | 54 | MGIQTSPVLL | 116 |
| 034 | signal | CCTGCTGGCCTCCCTGGGGGTGGG | | ASLGVGLVT | |
| | | GCTGGTCACTCTGCTCGGCCTGGC | | LLGLAVG | |
| | | TGTGGGC | | | |
| SS- | Secretion | ATGTCGGACCTGCTACTACTGGGC | 55 | MSDLLLLGLI | 117 |
| 035 | signal | CTGATTGGGGGCCTGACTCTCTTA | | GGLTLLLLLT | |
| | | CTGCTGCTGACGCTGCTAGCCTTT | | LLAFA | |
| | | GCC | | | |
| SS- | Secretion | ATGGAGACTGTGGTGATTGTTGCC | 56 | METVVIVAIG | 118 |
| 036 | signal | ATAGGTGTGCTGGCCACCATGTTT | | VLATIFLASF | |
| | | CTGGCTTCGTTTGCAGCCTTGGTG | | AALVLVCRQ | |
| | | CTGGTTTGCAGGCAG | | | |
| SS- | Secretion | ATGCGCGGCTCTGTGGAGTGCACC | 57 | MAGSVECTW | 119 |
| 037 | signal | TGGGGTTGGGGGCACTGTGCCCCC | | GWGHCAPSP | |
| | | AGCCCCCTGCTCCTTTGGACTCTA | | LLLWTLLLFA | |
| | | CTTCTGTTTGCAGCCCCATTTGGC | | APFGLLG | |
| | | CTGCTGGGG | | | |
| SS- | Secretion | ATGATGCCGTCCCGTACCAACCTG | 58 | MMPSRTNLA | 120 |
| 038 | signal | GCTACTGGAATCCCCAGTAGTAAA | | TGIPSSKVKY | |
| | | GTGAAATATTCAAGGCTCTCCAGC | | SRLSSTDDGY | |
| | | ACAGACGATGGCTACATTGACCTT | | IDLQFKKTPP | |
| | | CAGTTTAAGAAAACCCCTCCTAAG | | KIPYKAIALA | |
| | | ATCCCTTATAAGGCCATCGCACTT | | TVLFLIGA | |
| | | GCCACTGTGCTGTTTTTGATTGGC | | | |
| | | GCC | | | |
| SS- | Secretion | ATGGCCCTGCCCCAGATGTGTGAC | 59 | MALPQMCDG | 121 |
| 039 | signal | GGGAGCCACTTGGCCTCCACCCTC | | SHLASTLRYC | |
| | | CGCTATTGCATGACAGTCAGCGGC | | MTVSGTVVL | |
| | | ACAGTGGTTCTGGTGGCCGGGAC | | VAGTLCFA | |
| | | GCTCTGCTTCGCT | | | |
| SS- | Vrg-6 | TGAAAAAGTGGTTCGTTGCTGCCG | 60 | MKKWFVAA | 122 |
| 041 | | GCATCGGCGCTGCCGGACTCATGC | | GIGAGLLMLS | |
| | | TCTCCAGCGCCGCCA | | SAA | |
| SS- | PhoA | ATGAAACAGAGCACCATTGCGCT | 61 | MKQSTIALAL | 123 |
| 042 | | GGCGCTGCTGCCGCTGCTGTTTAC | | LPLLFTPVTKA | |
| | | CCCGGTGACCAAAGCG | | | |
| SS- | OmpA | ATGAAAAAAACCGCGATTGCGAT | 62 | MKKTAIAIAV | 124 |
| 043 | | TGCGGTGGCGCTGGCGGGCTTTGC | | ALAGFATVA | |
| | | GACCGTGGCGCAGGCG | | QA | |
| SS- | STI | ATGAAAAAACTGATGCTGGCGAT | 63 | MKKLMLAIF | 125 |
| 044 | | TTTTTTTAGCGTGCTGAGCTTTCCG | | FSVLSFPSFSQS | |
| | | AGCTTTAGCCAGAGC | | | |
| SS- | STII | ATGAAAAAAAACATTGCGTTTCTG | 64 | MKKNIAFLL | 126 |
| 045 | | CTGGCGAGCATGTTTGTGTTTAGC | | ASMFVFSIAT | |
| | | ATTGCGACCAACGCGTATGCG | | NAYA | |
| SS- | Amylase | ATGTTTGCGAAACGCTTTAAAACC | 65 | MFAKRFKTS | 127 |
| 046 | | AGCCTGCTGCCGCTGTTTGCGGGC | | LLPLFAGFLL | |
| | | TTTCTGCTGCTGTTTCATCTGGTGC | | LFHLVLAGPA | |
| | | TGGCGGGCCCGGCGGCGGCGAGC | | AAS | |
| SS- | Alpha | ATGCGCTTTCCGAGCATTTTTACC | 66 | MRFPSIFTAV | 128 |
| 047 | Factor | GCGGTGCTGTTTGCGGCGAGCAGC | | LFAASSALA | |
| | | GCGCTGGCG | | | |
| SS- | Alpha | ATGCGCTTTCCGAGCATTTTTACC | 67 | MRFPSIFTTV | 129 |
| 048 | Factor | ACCGTGCTGTTTGCGGCGAGCAGC | | LFAASSALA | |
| | | GCGCTGGCG | | | |
| SS- | Alpha | ATGCGCTTTCCGAGCATTTTTACC | 68 | MRFPSIFTSV | 130 |
| 049 | Factor | AGCGTGCTGTTTGCGGCGAGCAGC | | LFAASSALA | |
| | | GCGCTGGCG | | | |
| SS- | Alpha | ATGCGCTTTCCGAGCATTTTTACC | 69 | MRFPSIFTHV | 131 |
| 050 | Factor | CATGTGCTGTTTGCGGCGAGCAGC | | LFAASSALA | |
| | | GCGCTGGCG | | | |
| SS- | Alpha | ATGCGCTTTCCGAGCATTTTTACC | 70 | MRFPSIFTIVL | 132 |
| 051 | Factor | ATTGTGCTGTTTGCGGCGAGCAGC | | FAASSALA | |
| | | GCGCTGGCG | | | |
| SS- | Alpha | ATGCGCTTTCCGAGCATTTTTACC | 71 | MRFPSIFTFV | 133 |
| 052 | Factor | TTTGTGCTGTTTGCGGCGAGCAGC | | LFAASSALA | |
| | | GCGCTGGCG | | | |
| SS- | Alpha | ATGCGCTTTCCGAGCATTTTTACC | 72 | MRFPSIFTEV | 134 |
| 053 | Factor | GAAGTGCTGTTTGCGGCGAGCAG | | LFAASSALA | |
| | | CGCGCTGGCG | | | |
| SS- | Alpha | ATGCGCTTTCCGAGCATTTTTACC | 73 | MRFPSIFTGV | 135 |
| 054 | Factor | GGCGTGCTGTTTGCGGCGAGCAGC | | LFAASSALA | |
| | | GCGCTGGCG | | | |
| SS- | Endoglucanase V | ATGCGTTCCTCCCCCCTCCTCCGC | 74 | MRSSPLLRSA | 136 |
| 055 | | TCCGCCGTTGTGGCCGCCCTGCCG | | VVAALPVLA | |
| | | GTGTTGGCCCTTGCC | | LA | |
| SS- | Secretion | ATGGGCGCGGCGGCCGTGCGCTG | 75 | MGAAAVRW | 137 |
| 056 | signal | GCACTTGTGCGTGCTGCTGGCCCT | | HLCVLLALG | |
| | | GGGCACACGCGGGCGGCTG | | TRGRL | |
| SS- | Fungal | ATGAGGAGCTCCCTTGTGCTGTTC | 76 | MRSSLVLFFV | 138 |
| 057 | | TTTGTCTCTGCGTGGACGGCCTTG | | SAWTALA | |
| | | GCCAG | | | |
| SS- | Fibronectin | ATGCTCAGGGGTCCGGGACCCGG | 77 | MLRGPGPGR | 139 |
| 058 | | GCGGCTGCTGCTGCTAGCAGTCCT | | LLLLAVLCLG | |
| | | GTGCCTGGGGACATCGGTGCGCTG | | TSVRCTETGK | |
| | | CACCGAAACCGGGAAGAGCAAGA | | SKR | |
| | | GG | | | |
| SS- | Fibronectin | ATGCTTAGGGGTCCGGGGCCCGG | 78 | MLRGPGPGL | 140 |
| 059 | | GCTGCTGCTGCTGGCCGTCCAGCT | | LLLAVQCLG | |
| | | GGGGACAGCGGTGCCCTCCACG | | TAVPSTGA | |
| SS- | Fibronectin | ATGCGCCGGGGGGCCCTGACCGG | 79 | MRRGALTGL | 141 |
| 060 | | GCTGCTCCTGGTCCTGTGCCTGAG | | LLVLCLSVVL | |
| | | TGTTGTGCTACGTGCAGCCCCCTC | | RAAPSATSKK | |
| | | TGCAACAAGCAAGAAGCGCAGG | | RR | |

[0230] In the table, SS is secretion signal and MLS is mitochondrial leader signal. The cell phenotype altering primary constructs or mmRNA of the present invention may be designed to encode any of the signal sequences of SEQ ID NOs 80-141, or fragments or variants thereof. These sequences may be included at the beginning of the polypeptide coding region, in the middle or at the terminus or alternatively into a flanking region. Further, any of the cell phenotype altering polynucleotide primary constructs of the present invention may also comprise one or more of the sequences defined by SEQ ID NOs 18-79. These may be in the first region or either flanking region.

[0231] Additional signal sequences which may be utilized in the present invention include those taught in, for example, databases such as those found at http://www.signalpeptide.de/ or http://proline.bic.nus.edu.sg/spdb/. Those described in U.S. Pat. Nos. 8,124,379; 7,413,875 and 7,385,034 are also within the scope of the invention and the contents of each are incorporated herein by reference in their entirety.

### Target Selection

[0232] According to the present invention, the cell phenotype altering primary constructs comprise at least a first region of linked nucleosides encoding at least one cell phenotype altering polypeptide of interest. The cell phenotype altering polypeptides of interest or “Targets” of the present invention are listed in Table 6 below, and are described in Tables 1, 2 and 3 of International Publication No. WO2011130624 in addition to the IFN-signature genes, cell-specific polypeptides, death receptors and death receptor ligand and mitogen receptors in WO2011130624; herein incorporated by reference in its entirety. Shown in Table 6, in addition to the name and description of the gene encoding the polypeptide of interest are the ENSEMBL Transcript ID (ENST), the ENSEMBL Protein ID (ENSP) and when available the optimized sequence ID (ORF SEQ ID). For any particular gene there may exist one or more variants or isoforms. Where these exist, they are shown in the table as well. It will be appreciated by those of skill in the art that disclosed in the Table are potential flanking regions. These are encoded in each ENST transcript either to the 5′ (upstream) or 3′ (downstream) of the ORF or coding region. The coding region is definitively and specifically disclosed by teaching the ENSP sequence. Consequently, the sequences taught flanking that encoding the protein are considered flanking regions. It is also possible to further characterize the 5′ and 3′ flanking regions by utilizing one or more available databases or algorithms. Databases have annotated the features contained in the flanking regions of the ENST transcripts and these are available in the art.

TABLE 6
Cell Phenotype Altering Targets

| | | | | | Optimized | | |
|---|---|---|---|---|---|---|---|
| | | | | SEQ | Trans | | SEQ |
| Target | | | | ID | SEQ ID | | ID |
| No | Gene | Description | ENST | NO | NO | ENSP | NO |
| 1 | OCT4 | POU class 5 homeobox 1 | 448657 | 142 | | 416165 | 269 |
| 2 | OCT4 | POU class 5 homeobox 1 | 259915 | 143 | | 259915 | 270 |
| 3 | OCT4 | POU class 5 homeobox 1 | 550572 | 144 | | 448254 | 271 |
| 4 | OCT4 | POU class 5 homeobox 1 | 376243 | 145 | | 365419 | 272 |
| 5 | OCT4 | POU class 5 homeobox 1 | 383524 | 146 | | 373016 | 273 |
| 6 | OCT4 | POU class 5 homeobox 1 | 553206 | 147 | | 446757 | 274 |
| 7 | OCT4 | POU class 5 homeobox 1 | 412166 | 148 | | 387646 | 275 |
| 8 | OCT4 | POU class 5 homeobox 1 | 434616 | 149 | | 388842 | 276 |
| 9 | OCT4 | POU class 5 homeobox 1 | 550521 | 150 | | 447969 | 277 |
| 10 | OCT4 | POU class 5 homeobox 1 | 553069 | 151 | | 448231 | 278 |
| 11 | OCT4 | POU class 5 homeobox 1 | 549294 | 152 | | 446561 | 279 |
| 12 | OCT4 | POU class 5 homeobox 1 | 433348 | 153 | | 412665 | 280 |
| 13 | OCT4 | POU class 5 homeobox 1 | 546505 | 154 | | 448154 | 281 |
| 14 | OCT4 | POU class 5 homeobox 1 | 454714 | 155 | | 400047 | 282 |
| 15 | OCT4 | POU class 5 homeobox 1 | 451077 | 156 | | 391507 | 283 |
| 16 | OCT4 | POU class 5 homeobox 1 | 429603 | 157 | | 392877 | 284 |
| 17 | OCT4 | POU class 5 homeobox 1 | 547234 | 158 | | 449442 | 285 |
| 18 | OCT4 | POU class 5 homeobox 1 | 547658 | 159 | | 446962 | 286 |
| 19 | OCT4 | POU class 5 homeobox 1 | 548682 | 160 | | 446815 | 287 |
| 20 | OCT4 | POU class 5 homeobox 1 | 550059 | 161 | | 447874 | 288 |
| 21 | OCT4 | POU class 5 homeobox 1 | 433063 | 162 | | 405041 | 289 |
| 22 | OCT4 | POU class 5 homeobox 1 | 419095 | 163 | | 413622 | 290 |
| 23 | OCT4 | POU class 5 homeobox 1 | 548685 | 164 | | 447156 | 291 |
| 24 | OCT4 | POU class 5 homeobox 1 | 429314 | 165 | | 387619 | 292 |
| 25 | OCT4 | POU class 5 homeobox 1 | 437747 | 166 | | 391681 | 293 |
| 26 | OCT4 | POU class 5 homeobox 1 | 547981 | 167 | | 446531 | 294 |
| 27 | SOX1 | SRY (sex determining | 330949 | 168 | | 330218 | 295 |
| | | region Y)-box 1 | | | | | |
| 28 | SOX2 | SRY (sex determining | 325404 | 169 | | 323588 | 296 |
| | | region Y)-box 2 | | | | | |
| 29 | SOX2 | SRY (sex determining | 431565 | 170 | | 439111 | 297 |
| | | region Y)-box 2 | | | | | |
| 30 | SOX3 | SRY (sex determining | 370536 | 171 | | 359567 | 298 |
| | | region Y)-box 3 | | | | | |
| 31 | SOX15 | SRY (sex determining | 538513 | 172 | | 439311 | 299 |
| | | region Y)-box 15 | | | | | |
| 32 | SOX18 | SRY (sex determining | 340356 | 173 | | 341815 | 300 |
| | | region Y)-box 18 | | | | | |
| 33 | NANOG | Nanog homeobox | 229307 | 174 | | 229307 | 301 |
| 34 | NANOG | Nanog homeobox | 526286 | 175 | | 435288 | 302 |
| 35 | KLF1 | Kruppel-like factor 1 | 264834 | 176 | | 264834 | 303 |
| | | (erythroid) | | | | | |
| 36 | KLF2 | Kruppel-like factor 2 | 248071 | 177 | | 248071 | 304 |
| | | (lung) | | | | | |
| 37 | KLF4 | Kruppel-like factor 4 (gut) | 411706 | 178 | | 399921 | 305 |
| 38 | KLF4 | Kruppel-like factor 4 (gut) | 439281 | 179 | | 396294 | 306 |
| 39 | KLF4 | Kruppel-like factor 4 (gut) | 420475 | 180 | | 404922 | 307 |
| 40 | KLF4 | Kruppel-like factor 4 (gut) | 374672 | 181 | | 363804 | 308 |
| 41 | KLF5 | Kruppel-like factor 5 | 377687 | 182 | | 366915 | 309 |
| | | (intestinal) | | | | | |
| 42 | KLF5 | Kruppel-like factor 5 | 539231 | 183 | | 440407 | 310 |
| | | (intestinal) | | | | | |
| 43 | KLF5 | Kruppel-like factor 5 | 545883 | 184 | | 443600 | 311 |
| | | (intestinal) | | | | | |
| 44 | NR5A2 | nuclear receptor subfamily | 537715 | 185 | | 440930 | 312 |
| | | 5, group A, member 2 | | | | | |
| 45 | NR5A2 | nuclear receptor subfamily | 367357 | 186 | | 356326 | 313 |
| | | 5, group A, member 2 | | | | | |
| 46 | NR5A2 | nuclear receptor subfamily | 367362 | 187 | | 356331 | 314 |
| | | 5, group A, member 2 | | | | | |
| 47 | NR5A2 | nuclear receptor subfamily | 447034 | 188 | | 414888 | 315 |
| | | 5, group A, member 2 | | | | | |
| 48 | NR5A2 | nuclear receptor subfamily | 544748 | 189 | | 439116 | 316 |
| | | 5, group A, member 2 | | | | | |
| 49 | NR5A2 | nuclear receptor subfamily | 235480 | 190 | | 235480 | 317 |
| | | 5, group A, member 2 | | | | | |
| 50 | NR5A2 | nuclear receptor subfamily | 236914 | 191 | | 236914 | 318 |
| | | 5, group A, member 2 | | | | | |
| 51 | NR5A2 | nuclear receptor subfamily | 542116 | 192 | | 443477 | 319 |
| | | 5, group A, member 2 | | | | | |
| 52 | c-MYC | v-myc myelocytomatosis | 524013 | 193 | | 430235 | 320 |
| | | viral oncogene homolog | | | | | |
| | | (avian) | | | | | |
| 53 | c-MYC | v-myc myelocytomatosis | 259523 | 194 | | 259523 | 321 |
| | | viral oncogene homolog | | | | | |
| | | (avian) | | | | | |
| 54 | c-MYC | v-myc myelocytomatosis | 377970 | 195 | | 367207 | 322 |
| | | viral oncogene homolog | | | | | |
| | | (avian) | | | | | |
| 55 | c-MYC | v-myc myelocytomatosis | 454617 | 196 | | 405312 | 323 |
| | | viral oncogene homolog | | | | | |
| | | (avian) | | | | | |
| 56 | n-MYC | v-myc myelocytomatosis | 426211 | 197 | | 390305 | 324 |
| | | viral related oncogene, | | | | | |
| | | neuroblastoma derived | | | | | |
| | | (avian) | | | | | |
| 57 | n-MYC | v-myc myelocytomatosis | 281043 | 198 | | 281043 | 325 |
| | | viral related oncogene, | | | | | |
| | | neuroblastoma derived | | | | | |
| | | (avian) | | | | | |
| 58 | REM2 | RAS (RAD and GEM)-like | 267396 | 199 | | 267396 | 326 |
| | | GTP binding 2 | | | | | |
| 59 | REM2 | RAS (RAD and GEM)-like | 536884 | 200 | | 442774 | 327 |
| | | GTP binding 2 | | | | | |
| 60 | TERT | telomerase reverse | 296820 | 201 | | 296820 | 328 |
| | | transcriptase | | | | | |
| 61 | TERT | telomerase reverse | 334602 | 202 | | 334346 | 329 |
| | | transcriptase | | | | | |
| 62 | TERT | telomerase reverse | 310581 | 203 | | 309572 | 330 |
| | | transcriptase | | | | | |
| 63 | TERT | telomerase reverse | 508104 | 204 | | 426042 | 331 |
| | | transcriptase | | | | | |
| 64 | LIN28 | lin-28 homolog A | 254231 | 205 | | 254231 | 332 |
| | | (C. elegans) | | | | | |
| 65 | LIN28 | lin-28 homolog A | 326279 | 206 | | 363314 | 333 |
| | | (C. elegans) | | | | | |
| 66 | LIN28 | lin-28 homolog B | 345080 | 207 | | 344401 | 334 |
| | | (C. elegans) | | | | | |
| 67 | ASCL1 | achaete-scute complex | 266744 | 208 | | 266744 | 335 |
| | | homolog 1 (Drosophila) | | | | | |
| 68 | BRN2 | POU class 3 homeobox 2 | 328345 | 209 | | 329170 | 336 |
| 69 | BRN2 | POU class 3 homeobox 2 | 425116 | 210 | | 390039 | 337 |
| 70 | MYT1L | myelin transcription factor | 428368 | 211 | | 396103 | 338 |
| | | 1-like | | | | | |
| 71 | MYT1L | myelin transcription factor | 295067 | 212 | | 295067 | 339 |
| | | 1-like | | | | | |
| 72 | MYT1L | myelin transcription factor | 399161 | 213 | | 382114 | 340 |
| | | 1-like | | | | | |
| 73 | MYT1L | myelin transcription factor | 407844 | 214 | | 384219 | 341 |
| | | 1-like | | | | | |
| 74 | MYOD1 | myogenic differentiation 1 | 250003 | 215 | | 250003 | 342 |
| 75 | CEBP- | CCAAT/enhancer binding | 498907 | 216 | | 427514 | 343 |
| | alpha | protein (C/EBP), alpha | | | | | |
| 76 | PU.1 | spleen focus forming virus | 378538 | 217 | | 367799 | 344 |
| | | (SFFV) proviral | | | | | |
| | | integration oncogene spi1 | | | | | |
| 77 | PU.1 | spleen focus forming virus | 227163 | 218 | | 227163 | 345 |
| | | (SFFV) proviral | | | | | |
| | | integration oncogene spi1 | | | | | |
| 78 | PRDM16 | PR domain containing 16 | 408992 | 219 | | 386140 | 346 |
| 79 | PRDM16 | PR domain containing 16 | 378398 | 220 | | 367651 | 347 |
| 80 | PRDM16 | PR domain containing 16 | 509860 | 221 | | 425796 | 348 |
| 81 | PRDM16 | PR domain containing 16 | 270722 | 222 | | 270722 | 349 |
| 82 | PRDM16 | PR domain containing 16 | 441472 | 223 | | 407968 | 350 |
| 83 | PRDM16 | PR domain containing 16 | 442529 | 224 | | 405253 | 351 |
| 84 | HNF4- | hepatocyte nuclear factor | 443598 | 225 | | 410911 | 352 |
| | alpha | 4, alpha | | | | | |
| 85 | HNF4- | hepatocyte nuclear factor | 316099 | 226 | | 312987 | 353 |
| | alpha | 4, alpha | | | | | |
| 86 | HNF4- | hepatocyte nuclear factor | 316673 | 227 | | 315180 | 354 |
| | alpha | 4, alpha | | | | | |
| 87 | HNF4- | hepatocyte nuclear factor | 338692 | 228 | | 343807 | 355 |
| | alpha | 4, alpha | | | | | |
| 88 | HNF4- | hepatocyte nuclear factor | 457232 | 229 | | 396216 | 356 |
| | alpha | 4, alpha | | | | | |
| 89 | HNF4- | hepatocyte nuclear factor | 415691 | 230 | | 412111 | 357 |
| | alpha | 4, alpha | | | | | |
| 90 | BDNF | brain-derived neurotrophic | 532997 | 231 | | 435805 | 358 |
| | | factor | | | | | |
| 91 | BDNF | brain-derived neurotrophic | 525950 | 232 | | 432035 | 359 |
| | | factor | | | | | |
| 92 | BDNF | brain-derived neurotrophic | 438929 | 233 | | 414303 | 360 |
| | | factor | | | | | |
| 93 | BDNF | brain-derived neurotrophic | 525528 | 234 | | 437138 | 361 |
| | | factor | | | | | |
| 94 | BDNF | brain-derived neurotrophic | 533246 | 235 | | 432376 | 362 |
| | | factor | | | | | |
| 95 | BDNF | brain-derived neurotrophic | 533131 | 236 | | 432727 | 363 |
| | | factor | | | | | |
| 96 | BDNF | brain-derived neurotrophic | 439476 | 237 | | 389345 | 364 |
| | | factor | | | | | |
| 97 | BDNF | brain-derived neurotrophic | 395980 | 238 | | 379304 | 365 |
| | | factor | | | | | |
| 98 | BDNF | brain-derived neurotrophic | 395983 | 239 | | 379307 | 366 |
| | | factor | | | | | |
| 99 | BDNF | brain-derived neurotrophic | 395981 | 240 | | 379305 | 367 |
| | | factor | | | | | |
| 100 | BDNF | brain-derived neurotrophic | 395986 | 241 | | 379309 | 368 |
| | | factor | | | | | |
| 101 | BDNF | brain-derived neurotrophic | 395978 | 242 | | 379302 | 369 |
| | | factor | | | | | |
| 102 | BDNF | brain-derived neurotrophic | 356660 | 243 | | 349084 | 370 |
| | | factor | | | | | |
| 103 | BDNF | brain-derived neurotrophic | 530861 | 244 | | 435564 | 371 |
| | | factor | | | | | |
| 104 | BDNF | brain-derived neurotrophic | 418212 | 245 | | 400502 | 372 |
| | | factor | | | | | |
| 105 | BDNF | brain-derived neurotrophic | 420794 | 246 | | 389564 | 373 |
| | | factor | | | | | |
| 106 | BDNF | brain-derived neurotrophic | 314915 | 247 | | 320002 | 374 |
| | | factor | | | | | |
| 107 | NTF3 | neurotrophin 3 | 423158 | 248 | | 397297 | 375 |
| 108 | NTF3 | neurotrophin 3 | 331010 | 249 | | 328738 | 376 |
| 109 | NTF4 | neurotrophin 4 | 301411 | 250 | | 301411 | 377 |
| 110 | EGF | epidermal growth factor | 509793 | 251 | | 424316 | 378 |
| 111 | EGF | epidermal growth factor | 265171 | 252 | | 265171 | 379 |
| 112 | EGF | epidermal growth factor | 503392 | 253 | | 421384 | 380 |
| 113 | CNTF | ciliary neurotrophic factor | 361987 | 254 | | 355370 | 381 |
| 114 | NGF | nerve growth factor (beta | 369512 | 255 | | 358525 | 382 |
| | | polypeptide) | | | | | |
| 115 | | sonic hedgehog | 297261 | 256 | | 297261 | 383 |
| 116 | FGF-8 | fibroblast growth factor 8 | 320185 | 257 | | 321797 | 384 |
| | | (androgen-induced) | | | | | |
| 117 | FGF-8 | fibroblast growth factor 8 | 344255 | 258 | | 340039 | 385 |
| | | (androgen-induced) | | | | | |
| 118 | FGF-8 | fibroblast growth factor 8 | 347978 | 259 | | 321945 | 386 |
| | | (androgen-induced) | | | | | |
| 119 | FGF-8 | fibroblast growth factor 8 | 346714 | 260 | | 344306 | 387 |
| | | (androgen-induced) | | | | | |
| 120 | TGF- | transforming growth | 295400 | 261 | | 295400 | 388 |
| | alpha | factor, alpha | | | | | |
| 121 | TGF- | transforming growth | 418333 | 262 | | 404099 | 389 |
| | alpha | factor, alpha | | | | | |
| 122 | TGF- | transforming growth | 221930 | 263 | 268 | 221930 | 390 |
| | beta 1 | factor, beta 1 | | | | | |
| 123 | TGF- | transforming growth | 366930 | 264 | | 355897 | 391 |
| | beta 2 | factor, beta 2 | | | | | |
| 124 | TGF- | transforming growth | 366929 | 265 | | 355896 | 392 |
| | beta 2 | factor, beta 2 | | | | | |
| 125 | TGF- | transforming growth | 556285 | 266 | | 451110 | 393 |
| | beta 3 | factor, beta 3 | | | | | |
| 126 | TGF- | transforming growth | 238682 | 267 | | 238682 | 394 |
| | beta 3 | factor, beta 3 | | | | | |

[0233] In one embodiment, the cell phenotype altering primary constructs may comprise at least a first region of linked nucleosides encoding the coding region of at least one cell phenotype altering polypeptide of interest. As a non-limiting example, the first region of linked nucleosides may encode the coding region for c-MYC, KLF4, Lin28, SOX2 or OCT4.

[0234] In one embodiment, the cell phenotype altering primary construct may comprise a first region of linked nucleosides which has been codon optimized.

[0235] In one embodiment, the cell phenotype altering primary constructs may comprise any of the coding region sequences described in Table 7.

TABLE 7
Cell Phenotype Altering Coding Regions

| | | | | SEQ |
|---|---|---|---|---|
| Target | | | | ID |
| No | Gene | Description | Sequence | NO |
| 127 | c- | v-myc | AUGCCCCUCAACGUUAGCUUCACCAACAGGAACUA | 395 |
| | MYC | myelocytomatosis | UGACCUCGACUACGACUCGGUGCAGCCGUAUUUC | |
| | | viral | UACUGCGACGAGGAGGAGAACUUCUACCAGCAGC | |
| | | oncogene | AGCAGCAGAGCGAGCUGCAGCCCCCGGCGCCCAGC | |
| | | homolog | GAGGAUAUCUGGAAGAAAUUCGAGCUGCUGCCCA | |
| | | (avian) | CCCCGCCCCUGUCCCCUAGCCGCCGCUCCGGGCUC | |
| | | | UGCUCGCCCUCCUACGUUGCGGUCACACCCUUCUC | |
| | | | CCUUCGGGGAGACAACGACGGCGGUGGCGGGAGC | |
| | | | UUCUCCACGGCCGACCAGCUGGAGAUGGUGACCG | |
| | | | AGCUGCUGGGAGGAGACAUGGUGAACCAGAGUUU | |
| | | | CAUCUGCGACCCGGACGACGAGACCUUCAUCAAAA | |
| | | | ACAUCAUCAUCCAGGACUGUAUGUGGAGCGGCUU | |
| | | | CUCGGCCGCCGCCAAGCUCGUCUCAGAGAAGCUGG | |
| | | | CCUCCUACCAGGCUGCGCGCAAAGACAGCGGCAGC | |
| | | | CCGAACCCCGCCCGCGGCCACAGCGUCUGCUCCAC | |
| | | | CUCCAGCUUGUACCUGCAGGAUCUGAGCGCCGCCG | |
| | | | CCUCAGAGUGCAUCGACCCCUCGGUGGUCUUCCCC | |
| | | | UACCCUCUCAACGACAGCAGCUCGCCCAAGUCCUG | |
| | | | CGCCUCGCAAGACUCCAGCGCCUUCUCUCCGUCCU | |
| | | | CGGAUUCUCUGCUCUCCUCGACGGAGUCCUCCCCG | |
| | | | CAGGGCAGCCCCGAGCCCCUGGUGCUCCAUGAGGA | |
| | | | GACACCGCCCACCACCAGCAGCGACUCUGAGGAGG | |
| | | | AACAAGAAGAUGAGGAAGAAAUCGAUGUUGUUUC | |
| | | | UGUGGAAAAGAGGCAGGCUCCUGGCAAAAGGUCA | |
| | | | GAGUCUGGAUCACCUUCUGCUGGAGGCCACAGCA | |
| | | | AACCUCCUCACAGCCCACUGGUCCUCAAGAGGUGC | |
| | | | CACGUCUCCACACAUCAGCACAACUACGCAGCGCC | |
| | | | UCCCUCCACUCGGAAGGACUAUCCUGCUGCCAAGA | |
| | | | GGGUCAAGUUGGACAGUGUCAGAGUCCUGAGACA | |
| | | | GAUCAGCAACAACCGAAAAUGCACCAGCCCCAGGU | |
| | | | CCUCGGACACCGAGGAGAAUGUCAAGAGGCGAAC | |
| | | | ACACAACGUCUUGGAGCGCCAGAGGAGGAACGAG | |
| | | | CUAAAACGGAGCUUUUUUGCCCUGCGUGACCAGA | |
| | | | UCCCGGAGUUGGAAAACAAUGAAAAGGCCCCCAA | |
| | | | GGUAGUUAUCCUUAAAAAAGCCACAGCAUACAUC | |
| | | | CUGUCCGUCCAAGCAGAGGAGCAAAAGCUCAUUU | |
| | | | CUGAAGAGGACUUGUUGCGGAAACGACGAGAACA | |
| | | | GUUGAAACACAAACUUGAACAGCUACGGAACUCU | |
| | | | UGUGCG | |
| 128 | c- | v-myc | ATGCCCCTCAACGTTAGCTTCACCAACAGGAACTAT | 396 |
| | MYC | myelocytomatosis | GACCTCGACTACGACTCGGTGCAGCCGTATTTCTAC | |
| | | viral | TGCGACGAGGAGGAGAACTTCTACCAGCAGCAGCA | |
| | | oncogene | GCAGAGCGAGCTGCAGCCCCCGGCGCCCAGCGAGG | |
| | | homolog | ATATCTGGAAGAAATTCGAGCTGCTGCCCACCCCGC | |
| | | (avian) | CCCTGTCCCCTAGCCGCCGCTCCGGGCTCTGCTCGC | |
| | | | CCTCCTACGTTGCGGTCACACCCTTCTCCCTTCGGG | |
| | | | GAGACAACGACGGCGGTGGCGGGAGCTTCTCCACG | |
| | | | GCCGACCAGCTGGAGATGGTGACCGAGCTGCTGGG | |
| | | | AGGAGACATGGTGAACCAGAGTTTCATCTGCGACC | |
| | | | CGGACGACGAGACCTTCATCAAAAACATCATCATC | |
| | | | CAGGACTGTATGTGGAGCGGCTTCTCGGCCGCCGCC | |
| | | | AAGCTCGTCTCAGAGAAGCTGGCCTCCTACCAGGCT | |
| | | | GCGCGCAAAGACAGCGGCAGCCCGAACCCCGCCCG | |
| | | | CGGCCACAGCGTCTGCTCCACCTCCAGCTTGTACCT | |
| | | | GCAGGATCTGAGCGCCGCCGCCTCAGAGTGCATCG | |
| | | | ACCCCTCGGTGGTCTTCCCCTACCCTCTCAACGACA | |
| | | | GCAGCTCGCCCAAGTCCTGCGCCTCGCAAGACTCCA | |
| | | | GCGCCTTCTCTCCGTCCTCGGATTCTCTGCTCTCCTC | |
| | | | GACGGAGTCCTCCCCGCAGGGCAGCCCCGAGCCCC | |
| | | | TGGTGCTCCATGAGGAGACACCGCCCACCACCAGC | |
| | | | AGCGACTCTGAGGAGGAACAAGAAGATGAGGAAG | |
| | | | AAATCGATGTTGTTTCTGTGGAAAAGAGGCAGGCTC | |
| | | | CTGGCAAAAGGTCAGAGTCTGGATCACCTTCTGCTG | |
| | | | GAGGCCACAGCAAACCTCCTCACAGCCCACTGGTC | |
| | | | CTCAAGAGGTGCCACGTCTCCACACATCAGCACAA | |
| | | | CTACGCAGCGCCTCCCTCCACTCGGAAGGACTATCC | |
| | | | TGCTGCCAAGAGGGTCAAGTTGGACAGTGTCAGAG | |
| | | | TCCTGAGACAGATCAGCAACAACCGAAAATGCACC | |
| | | | AGCCCCAGGTCCTCGGACACCGAGGAGAATGTCAA | |
| | | | GAGGCGAACACACAACGTCTTGGAGCGCCAGAGGA | |
| | | | GGAACGAGCTAAAACGGAGCTTTTTTGCCCTGCGTG | |
| | | | ACCAGATCCCGGAGTTGGAAAACAATGAAAAGGCC | |
| | | | CCCAAGGTAGTTATCCTTAAAAAAGCCACAGCATA | |
| | | | CATCCTGTCCGTCCAAGCAGAGGAGCAAAAGCTCA | |
| | | | TTTCTGAAGAGGACTTGTTGCGGAAACGACGAGAA | |
| | | | CAGTTGAAACACAAACTTGAACAGCTACGGAACTC | |
| | | | TTGTGCG | |
| 129 | KLF4 | Kruppel-like | AUGAGGCAGCCACCUGGCGAGUCUGACAUGGCUG | 397 |
| | | factor 4 | UCAGCGACGCGCUGCUCCCAUCUUUCUCCACGUUC | |
| | | (gut) | GCGUCUGGCCCGGCGGGAAGGGAGAAGACACUGC | |
| | | | GUCAAGCAGGUGCCCCGAAUAACCGCUGGCGGGA | |
| | | | GGAGCUCUCCCACAUGAAGCGACUUCCCCCAGUGC | |
| | | | UUCCCGGCCGCCCCUAUGACCUGGCGGCGGCGACC | |
| | | | GUGGCCACAGACCUGGAGAGCGGCGGAGCCGGUG | |
| | | | CGGCUUGCGGCGGUAGCAACCUGGCGCCCCUACCU | |
| | | | CGGAGAGAGACCGAGGAGUUCAACGAUCUCCUGG | |
| | | | ACCUGGACUUUAUUCUCUCCAAUUCGCUGACCCAU | |
| | | | CCUCCGGAGUCAGUGGCCGCCACCGUGUCCUCGUC | |
| | | | AGCGUCAGCCUCCUCUUCGUCGUCGCCGUCGAGCA | |
| | | | GCGGCCCUGCCAGCGCGCCCUCCACCUGCAGCUUC | |
| | | | ACCUAUCCGAUCCGGGCCGGGAACGACCCGGGCGU | |
| | | | GGCGCCGGGCGGCACGGGCGGAGGCCUCCUCUAUG | |
| | | | GCAGGGAGUCCGCUCCCCCUCCGACGGCUCCCUUC | |
| | | | AACCUGGCGGACAUCAACGACGUGAGCCCCUCGGG | |
| | | | CGGCUUCGUGGCCGAGCUCCUGCGGCCAGAAUUG | |
| | | | GACCCGGUGUACAUUCCGCCGCAGCAGCCGCAGCC | |
| | | | GCCAGGUGGCGGGCUGAUGGGCAAGUUCGUGCUG | |
| | | | AAGGCGUCGCUGAGCGCCCCUGGCAGCGAGUACG | |
| | | | GCAGCCCGUCGGUCAUCAGCGUCAGCAAAGGCAGC | |
| | | | CCUGACGGCAGCCACCCGGUGGUGGUGGCGCCCUA | |
| | | | CAACGGCGGGCCGCCGCGCACGUGCCCCAAGAUCA | |
| | | | AGCAGGAGGCGGUCUCUUCGUGCACCCACUUGGG | |
| | | | CGCUGGACCCCCUCUCAGCAAUGGCCACCGGCCGG | |
| | | | CUGCACACGACUUCCCCCUGGGGCGGCAGCUCCCC | |
| | | | AGCAGGACUACCCCGACCCUGGGUCUUGAGGAAG | |
| | | | UGCUGAGCAGCAGGGACUGUCACCCUGCCCUGCCG | |
| | | | CUUCCUCCCGGCUUCCAUCCCCACCCGGGGCCCAA | |
| | | | UUACCCAUCCUUCCUGCCCGAUCAGAUGCAGCCGC | |
| | | | AAGUCCCGCCGCUCCAUUACCAAGAGCUCAUGCCA | |
| | | | CCCGGUUCCUGCAUGCCAGAGGAGCCCAAGCCAAA | |
| | | | GAGGGGAAGACGAUCGUGGCCCCGGAAAAGGACC | |
| | | | GCCACCCACACUUGUGAUUACGCGGGCUGCGGCAA | |
| | | | AACCUACACAAAGAGUUCCCAUCUCAAGGCACACC | |
| | | | UGCGAACCCACACAGGUGAGAAACCUUACCACUG | |
| | | | UGACUGGGACGGCUGUGGAUGGAAAUUCGCCCGC | |
| | | | UCAGAUGAACUGACCAGGCACUACCGUAAACACA | |
| | | | CGGGGCACCGCCCGUUCCAGUGCCAAAAAUGCGAC | |
| | | | CGAGCAUUUUCCAGGUCGGACCACCUCGCCUUACA | |
| | | | CAUGAAGAGGCAUUUU | |
| 130 | KLF4 | Kruppel-like | ATGAGGCAGCCACCTGGCGAGTCTGACATGGCTGT | 398 |
| | | factor 4 | CAGCGACGCGCTGCTCCCATCTTTCTCCACGTTCGC | |
| | | (gut) | GTCTGGCCCGGCGGGAAGGGAGAAGACACTGCGTC | |
| | | | AAGCAGGTGCCCCGAATAACCGCTGGCGGGAGGAG | |
| | | | CTCTCCCACATGAAGCGACTTCCCCCAGTGCTTCCC | |
| | | | GGCCGCCCCTATGACCTGGCGGCGGCGACCGTGGC | |
| | | | CACAGACCTGGAGAGCGGCGGAGCCGGTGCGGCTT | |
| | | | GCGGCGGTAGCAACCTGGCGCCCCTACCTCGGAGA | |
| | | | GAGACCGAGGAGTTCAACGATCTCCTGGACCTGGA | |
| | | | CTTTATTCTCTCCAATTCGCTGACCCATCCTCCGGAG | |
| | | | TCAGTGGCCGCCACCGTGTCCTCGTCAGCGTCAGCC | |
| | | | TCCTCTTCGTCGTCGCCGTCGAGCAGCGGCCCTGCC | |
| | | | AGCGCGCCCTCCACCTGCAGCTTCACCTATCCGATC | |
| | | | CGGGCCGGGAACGACCCGGGCGTGGCGCCGGGCGG | |
| | | | CACGGGCGGAGGCCTCCTCTATGGCAGGGAGTCCG | |
| | | | CTCCCCCTCCGACGGCTCCCTTCAACCTGGCGGACA | |
| | | | TCAACGACGTGAGCCCCTCGGGCGGCTTCGTGGCCG | |
| | | | AGCTCCTGCGGCCAGAATTGGACCCGGTGTACATTC | |
| | | | CGCCGCAGCAGCCGCAGCCGCCAGGTGGCGGGCTG | |
| | | | ATGGGCAAGTTCGTGCTGAAGGCGTCGCTGAGCGC | |
| | | | CCCTGGCAGCGAGTACGGCAGCCCGTCGGTCATCA | |
| | | | GCGTCAGCAAAGGCAGCCCTGACGGCAGCCACCCG | |
| | | | GTGGTGGTGGCGCCCTACAACGGCGGGCCGCCGCG | |
| | | | CACGTGCCCCAAGATCAAGCAGGAGGCGGTCTCTT | |
| | | | CGTGCACCCACTTGGGCGCTGGACCCCCTCTCAGCA | |
| | | | ATGGCCACCGGCCGGCTGCACACGACTTCCCCCTGG | |
| | | | GGCGGCAGCTCCCCAGCAGGACTACCCCGACCCTG | |
| | | | GGTCTTGAGGAAGTGCTGAGCAGCAGGGACTGTCA | |
| | | | CCCTGCCCTGCCGCTTCCTCCCGGCTTCCATCCCCA | |
| | | | CCCGGGGCCCAATTACCCATCCTTCCTGCCCGATCA | |
| | | | GATGCAGCCGCAAGTCCCGCCGCTCCATTACCAAG | |
| | | | AGCTCATGCCACCCGGTTCCTGCATGCCAGAGGAGC | |
| | | | CCAAGCCAAAGAGGGGAAGACGATCGTGGCCCCGG | |
| | | | AAAAGGACCGCCACCCACACTTGTGATTACGCGGG | |
| | | | CTGCGGCAAAACCTACACAAAGAGTTCCCATCTCA | |
| | | | AGGCACACCTGCGAACCCACACAGGTGAGAAACCT | |
| | | | TACCACTGTGACTGGGACGGCTGTGGATGGAAATTC | |
| | | | GCCCGCTCAGATGAACTGACCAGGCACTACCGTAA | |
| | | | ACACACGGGGCACCGCCCGTTCCAGTGCCAAAAAT | |
| | | | GCGACCGAGCATTTTCCAGGTCGGACCACCTCGCCT | |
| | | | TACACATGAAGAGGCATTTT | |
| 131 | LIN28 | lin-28 | AUGGGAUCAGUCUCCAACCAACAAUUUGCCGGUG | 399 |
| | | homolog A | GGUGCGCCAAGGCAGCAGAGGAAGCGCCAGAAGA | |
| | | | AGCUCCCGAGGAUGCCGCACGUGCAGCCGAUGAGC | |
| | | | CUCAGCUGCUUCAUGGUGCAGGCAUUUGCAAGUG | |
| | | | GUUCAAUGUUCGAAUGGGUUUUGGAUUCCUUUCA | |
| | | | AUGACCGCAAGAGCAGGAGUGGCCCUUGAUCCAC | |
| | | | CCGUGGAUGUGUUUGUGCACCAGUCGAAGCUGCA | |
| | | | CAUGGAAGGAUUCCGCUCGCUUAAGGAAGGAGAA | |
| | | | GCAGUCGAGUUUACCUUUAAGAAGUCUGCUAAGG | |
| | | | GGCUCGAAAGCAUCAGAGUCACGGGACCAGGAGG | |
| | | | UGUGUUUUGUAUCGGCUCGGAGCGGAGGCCUAAA | |
| | | | GGGAAGUCCAUGCAAAAGCGCAGAUCAAAAGGAG | |
| | | | ACAGGUGCUACAACUGUGGUGGUCUGGACCAUCA | |
| | | | UGCGAAGGAAUGUAAGCUCCCUCCGCAGCCCAAA | |
| | | | AAGUGUCACUUCUGUCAGUCCAUAUCGCAUAUGG | |
| | | | UGGCAUCCUGUCCAUUGAAAGCACAGCAAGGCCC | |
| | | | UAGCGCACAAGGCAAACCUACUUACUUUCGGGAA | |
| | | | GAGGAGGAAGAAAUUCAUAGCCCUACUCUGCUGC | |
| | | | CAGAAGCGCAAAAC | |
| 132 | LIN28 | lin-28 | ATGGGATCAGTCTCCAACCAACAATTTGCCGGTGGG | 400 |
| | | homolog A | TGCGCCAAGGCAGCAGAGGAAGCGCCAGAAGAAG | |
| | | | CTCCCGAGGATGCCGCACGTGCAGCCGATGAGCCT | |
| | | | CAGCTGCTTCATGGTGCAGGCATTTGCAAGTGGTTC | |
| | | | AATGTTCGAATGGGTTTTGGATTCCTTTCAATGACC | |
| | | | GCAAGAGCAGGAGTGGCCCTTGATCCACCCGTGGA | |
| | | | TGTGTTTGTGCACCAGTCGAAGCTGCACATGGAAGG | |
| | | | ATTCCGCTCGCTTAAGGAAGGAGAAGCAGTCGAGT | |
| | | | TTACCTTTAAGAAGTCTGCTAAGGGGCTCGAAAGCA | |
| | | | TCAGAGTCACGGGACCAGGAGGTGTGTTTTGTATCG | |
| | | | GCTCGGAGCGGAGGCCTAAAGGGAAGTCCATGCAA | |
| | | | AAGCGCAGATCAAAAGGAGACAGGTGCTACAACTG | |
| | | | TGGTGGTCTGGACCATCATGCGAAGGAATGTAAGC | |
| | | | TCCCTCCGCAGCCCAAAAAGTGTCACTTCTGTCAGT | |
| | | | CCATATCGCATATGGTGGCATCCTGTCCATTGAAAG | |
| | | | CACAGCAAGGCCCTAGCGCACAAGGCAAACCTACT | |
| | | | TACTTTCGGGAAGAGGAGGAAGAAATTCATAGCCC | |
| | | | TACTCTGCTGCCAGAAGCGCAAAAC | |
| 133 | SOX2 | SRY (sex | AUGUACAAUAUGAUGGAAACCGAACUGAAGCCAC | 401 |
| | | determining | CCGGUCCGCAACAGACGUCAGGCGGUGGCGGAGG | |
| | | region Y)- | UAAUUCCACUGCAGCAGCAGCAGGAGGGAAUCAG | |
| | | box 2 | AAAAACUCUCCUGACAGAGUGAAGCGCCCUAUGA | |
| | | | ACGCAUUCAUGGUCUGGUCAAGAGGACAGAGACG | |
| | | | GAAGAUGGCACAAGAAAAUCCGAAAAUGCACAAC | |
| | | | UCAGAGAUCAGCAAGAGACUUGGCGCUGAAUGGA | |
| | | | AACUUCUGUCCGAGACGGAAAAGCGGCCUUUUAU | |
| | | | AGACGAAGCAAAGAGGCUUCGCGCACUCCAUAUG | |
| | | | AAGGAACAUCCCGAUUACAAGUACCGUCCAAGAC | |
| | | | GAAAAACCAAGACUCUUAUGAAGAAGGAUAAGUA | |
| | | | CACUCUUCCUGGUGGACUGCUGGCGCCAGGGGGA | |
| | | | AAUUCGAUGGCCUCGGGAGUCGGGGUCGGAGCUG | |
| | | | GACUGGGAGCGGGAGUGAACCAACGCAUGGAUUC | |
| | | | GUACGCCCAUAUGAACGGUUGGAGCAAUGGCAGC | |
| | | | UAUUCCAUGAUGCAAGAUCAACUGGGAUACCCCC | |
| | | | AACAUCCCGGUCUUAACGCCCACGGCGCAGCACAA | |
| | | | AUGCAGCCUAUGCACCGGUACGAUGUUUCGGCGC | |
| | | | UGCAAUACAACUCGAUGACCUCCUCACAGACUUAC | |
| | | | AUGAACGGUUCCCCAACCUAUUCGAUGUCAUACU | |
| | | | CGCAGCAAGGGACCCCUGGCAUGGCACUCGGUAGC | |
| | | | AUGGGAUCAGUGGUGAAAUCCGAAGCAAGCAGCA | |
| | | | GCCCUCCAGUGGUCACUUCCAGCUCCCAUUCGCGU | |
| | | | GCGCCUUGUCAAGCUGGCGACCUCAGGGACAUGA | |
| | | | UUUCGAUGUACCUGCCAGGAGCCGAGGUGCCGGA | |
| | | | GCCCGCAGCCCCAUCGCGAUUGCACAUGUCACAGC | |
| | | | AUUACCAGUCCGGACCAGUGCCUGGUACCGCCAUU | |
| | | | AACGGGACCCUCCCUUUGUCCCAUAUG | |
| 134 | SOX2 | SRY (sex | ATGTACAATATGATGGAAACCGAACTGAAGCCACC | 402 |
| | | determining | CGGTCCGCAACAGACGTCAGGCGGTGGCGGAGGTA | |
| | | region Y)- | ATTCCACTGCAGCAGCAGCAGGAGGGAATCAGAAA | |
| | | box 2 | AACTCTCCTGACAGAGTGAAGCGCCCTATGAACGC | |
| | | | ATTCATGGTCTGGTCAAGAGGACAGAGACGGAAGA | |
| | | | TGGCACAAGAAAATCCGAAAATGCACAACTCAGAG | |
| | | | ATCAGCAAGAGACTTGGCGCTGAATGGAAACTTCT | |
| | | | GTCCGAGACGGAAAAGCGGCCTTTTATAGACGAAG | |
| | | | CAAAGAGGCTTCGCGCACTCCATATGAAGGAACAT | |
| | | | CCCGATTACAAGTACCGTCCAAGACGAAAAACCAA | |
| | | | GACTCTTATGAAGAAGGATAAGTACACTCTTCCTGG | |
| | | | TGGACTGCTGGCGCCAGGGGGAAATTCGATGGCCT | |
| | | | CGGGAGTCGGGGTCGGAGCTGGACTGGGAGCGGGA | |
| | | | GTGAACCAACGCATGGATTCGTACGCCCATATGAA | |
| | | | CGGTTGGAGCAATGGCAGCTATTCCATGATGCAAG | |
| | | | ATCAACTGGGATACCCCCAACATCCCGGTCTTAACG | |
| | | | CCCACGGCGCAGCACAAATGCAGCCTATGCACCGG | |
| | | | TACGATGTTTCGGCGCTGCAATACAACTCGATGACC | |
| | | | TCCTCACAGACTTACATGAACGGTTCCCCAACCTAT | |
| | | | TCGATGTCATACTCGCAGCAAGGGACCCCTGGCATG | |
| | | | GCACTCGGTAGCATGGGATCAGTGGTGAAATCCGA | |
| | | | AGCAAGCAGCAGCCCTCCAGTGGTCACTTCCAGCTC | |
| | | | CCATTCGCGTGCGCCTTGTCAAGCTGGCGACCTCAG | |
| | | | GGACATGATTTCGATGTACCTGCCAGGAGCCGAGG | |
| | | | TGCCGGAGCCCGCAGCCCCATCGCGATTGCACATGT | |
| | | | CACAGCATTACCAGTCCGGACCAGTGCCTGGTACCG | |
| | | | CCATTAACGGGACCCTCCCTTTGTCCCATATG | |
| 135 | OCT4 | POU class 5 | AUGGCAGGACAUCUCGCAUCAGACUUCGCAUUUU | 403 |
| | | homeobox 1 | CACCACCACCAGGAGGAGGAGGGGACGGACCAGG | |
| | | | GGGUCCGGAGCCGGGAUGGGUCGACCCGAGGACU | |
| | | | UGGCUGAGCUUCCAAGGCCCGCCUGGCGGACCCGG | |
| | | | AAUCGGACCGGGCGUCGGGCCAGGCUCCGAGGUC | |
| | | | UGGGGAAUCCCACCUUGCCCUCCGCCAUACGAGUU | |
| | | | CUGCGGCGGGAUGGCCUAUUGCGGUCCGCAAGUG | |
| | | | GGUGUGGGACUCGUGCCCCAGGGCGGAUUGGAAA | |
| | | | CCUCGCAGCCGGAAGGUGAAGCUGGCGUGGGCGU | |
| | | | UGAGUCGAACUCCGAUGGAGCCUCCCCGGAGCCUU | |
| | | | GCACCGUCACCCCGGGAGCCGUGAAGCUCGAGAAA | |
| | | | GAAAAGCUCGAACAGAACCCCGAAGAGAGCCAAG | |
| | | | AUAUCAAGGCACUCCAGAAAGAACUCGAACAGUU | |
| | | | UGCGAAGCUGCUGAAGCAGAAGCGGAUCACUCUG | |
| | | | GGUUACACCCAGGCCGAUGUGGGACUGACUCUCG | |
| | | | GUGUGCUGUUCGGGAAGGUGUUCUCUCAAACGAC | |
| | | | UAUCUGUAGAUUCGAGGCCCUGCAGCUGUCGUUC | |
| | | | AAGAAUAUGUGUAAACUGCGCCCCCUGCUGCAAA | |
| | | | AAUGGGUGGAAGAAGCAGACAACAACGAGAACUU | |
| | | | GCAAGAGAUUUGCAAGGCCGAAACCUUGGUGCAA | |
| | | | GCCCGCAAGAGGAAGCGGACCAGCAUCGAAAAUC | |
| | | | GCGUUAGAGGAAAUCUUGAGAACCUGUUCCUUCA | |
| | | | GUGCCCAAAGCCAACGCUGCAGCAAAUUUCACACA | |
| | | | UCGCGCAGCAGCUCGGACUGGAGAAAGACGUGGU | |
| | | | GCGAGUGUGGUUCUGCAACCGCCGGCAGAAAGGA | |
| | | | AAGAGAUCCAGCUCAGAUUACGCGCAGCGGGAGG | |
| | | | ACUUUGAAGCUGCCGGAUCCCCCUUUUCGGGGGG | |
| | | | ACCGGUCAGCUUCCCACUGGCCCCUGGCCCGCACU | |
| | | | UUGGUACCCCGGGAUACGGAUCCCCGCACUUCACU | |
| | | | GCUCUGUACUCGUCGGUCCCCUUCCCGGAAGGCGA | |
| | | | AGCGUUCCCUCCUGUCUCAGUGACUACUCUUGGA | |
| | | | UCGCCGAUGCAUAGCAAU | |
| 136 | OCT4 | POU class 5 | ATGGCAGGACATCTCGCATCAGACTTCGCATTTTCA | 404 |
| | | homeobox 1 | CCACCACCAGGAGGAGGAGGGGACGGACCAGGGG | |
| | | | GTCCGGAGCCGGGATGGGTCGACCCGAGGACTTGG | |
| | | | CTGAGCTTCCAAGGCCCGCCTGGCGGACCCGGAAT | |
| | | | CGGACCGGGCGTCGGGCCAGGCTCCGAGGTCTGGG | |
| | | | GAATCCCACCTTGCCCTCCGCCATACGAGTTCTGCG | |
| | | | GCGGGATGGCCTATTGCGGTCCGCAAGTGGGTGTG | |
| | | | GGACTCGTGCCCCAGGGCGGATTGGAAACCTCGCA | |
| | | | GCCGGAAGGTGAAGCTGGCGTGGGCGTTGAGTCGA | |
| | | | ACTCCGATGGAGCCTCCCCGGAGCCTTGCACCGTCA | |
| | | | CCCCGGGAGCCGTGAAGCTCGAGAAAGAAAAGCTC | |
| | | | GAACAGAACCCCGAAGAGAGCCAAGATATCAAGGC | |
| | | | ACTCCAGAAAGAACTCGAACAGTTTGCGAAGCTGC | |
| | | | TGAAGCAGAAGCGGATCACTCTGGGTTACACCCAG | |
| | | | GCCGATGTGGGACTGACTCTCGGTGTGCTGTTCGGG | |
| | | | AAGGTGTTCTCTCAAACGACTATCTGTAGATTCGAG | |
| | | | GCCCTGCAGCTGTCGTTCAAGAATATGTGTAAACTG | |
| | | | CGCCCCCTGCTGCAAAAATGGGTGGAAGAAGCAGA | |
| | | | CAACAACGAGAACTTGCAAGAGATTTGCAAGGCCG | |
| | | | AAACCTTGGTGCAAGCCCGCAAGAGGAAGCGGACC | |
| | | | AGCATCGAAAATCGCGTTAGAGGAAATCTTGAGAA | |
| | | | CCTGTTCCTTCAGTGCCCAAAGCCAACGCTGCAGCA | |
| | | | AATTTCACACATCGCGCAGCAGCTCGGACTGGAGA | |
| | | | AAGACGTGGTGCGAGTGTGGTTCTGCAACCGCCGG | |
| | | | CAGAAAGGAAAGAGATCCAGCTCAGATTACGCGCA | |
| | | | GCGGGAGGACTTTGAAGCTGCCGGATCCCCCTTTTC | |
| | | | GGGGGGACCGGTCAGCTTCCCACTGGCCCCTGGCCC | |
| | | | GCACTTTGGTACCCCGGGATACGGATCCCCGCACTT | |
| | | | CACTGCTCTGTACTCGTCGGTCCCCTTCCCGGAAGG | |
| | | | CGAAGCGTTCCCTCCTGTCTCAGTGACTACTCTTGG | |
| | | | ATCGCCGATGCATAGCAAT | |

### Protein Cleavage Signals and Sites

[0236] In one embodiment, the cell phenotype altering polypeptides of the present invention may include at least one protein cleavage signal containing at least one protein cleavage site. The protein cleavage site may be located at the N-terminus, the C-terminus, at any space between the N- and the C-termini such as, but not limited to, half-way between the N- and C-termini, between the N-terminus and the half way point, between the half way point and the C-terminus, and combinations thereof.

[0237] The cell phenotype altering polypeptides of the present invention may include, but is not limited to, a proprotein convertase (or prohormone convertase), thrombin or Factor Xa protein cleavage signal. Proprotein convertases are a family of nine proteinases, comprising seven basic amino acid-specific subtilisin-like serine proteinases related to yeast kexin, known as prohormone convertase 1/3 (PC1/3), PC2, furin, PC4, PC5/6, paired basic amino-acid cleaving enzyme 4 (PACE4) and PC7, and two other subtilases that cleave at non-basic residues, called subtilisin kexin isozyme 1 (SKI-1) and proprotein convertase subtilisin kexin 9 (PCSK9). Non-limiting examples of protein cleavage signal amino acid sequences are listed in Table 7 of US Patent Publication No US20130259924, filed Mar. 9, 2013, the contents of which is herein incorporated by reference in its entirety.

[0238] In one embodiment, the cell phenotype altering primary constructs and the cell phenotype altering mmRNA of the present invention may be engineered such that the cell phenotype altering primary construct or mmRNA contains at least one encoded protein cleavage signal. The encoded protein cleavage signal may be located before the start codon, after the start codon, before the coding region, within the coding region such as, but not limited to, half way in the coding region, between the start codon and the half way point, between the half way point and the stop codon, after the coding region, before the stop codon, between two stop codons, after the stop codon and combinations thereof.

[0239] In one embodiment, the cell phenotype altering primary constructs or mmRNA of the present invention may include at least one encoded protein cleavage signal containing at least one protein cleavage site. The encoded protein cleavage signal may include, but is not limited to, a proprotein convertase (or prohormone convertase), thrombin and/or Factor Xa protein cleavage signal. One of skill in the art may use Table 1 above or other known methods to determine the appropriate encoded protein cleavage signal to include in the primary constructs or mmRNA of the present invention. For example, starting with the protein cleavage site sequences and considering the codons of Table 1 one can design a signal for the cell phenotype altering primary construct which can produce a protein signal in the resulting polypeptide.

[0240] In one embodiment, the cell phenotype altering polypeptides of the present invention include at least one protein cleavage signal and/or site.

[0241] As a non-limiting example, U.S. Pat. No. 7,374,930 and U.S. Pub. No. 20090227660, herein incorporated by reference in their entireties, use a furin cleavage site to cleave the N-terminal methionine of GLP-1 in the expression product from the Golgi apparatus of the cells. In one embodiment, the polypeptides of the present invention include at least one protein cleavage signal and/or site with the proviso that the polypeptide is not GLP-1.

[0242] In one embodiment, the cell phenotype altering primary constructs or mmRNA of the present invention includes at least one encoded protein cleavage signal and/or site.

[0243] In one embodiment, the cell phenotype altering primary constructs or mmRNA of the present invention includes at least one encoded protein cleavage signal and/or site with the proviso that the primary construct or mmRNA does not encode GLP-1.

[0244] In one embodiment, the cell phenotype altering primary constructs or mmRNA of the present invention may include more than one coding region. Where multiple coding regions are present in the cell phenotype altering primary construct or mmRNA of the present invention, the multiple coding regions may be separated by encoded protein cleavage sites. As a non-limiting example, the cell phenotype altering primary construct or mmRNA may be signed in an ordered pattern. On such pattern follows AXBY form where A and B are coding regions which may be the same or different coding regions and/or may encode the same or different polypeptides, and X and Y are encoded protein cleavage signals which may encode the same or different protein cleavage signals. A second such pattern follows the form AXYBZ where A and B are coding regions which may be the same or different coding regions and/or may encode the same or different polypeptides, and X, Y and Z are encoded protein cleavage signals which may encode the same or different protein cleavage signals. A third pattern follows the form ABXCY where A, B and C are coding regions which may be the same or different coding regions and/or may encode the same or different polypeptides, and X and Y are encoded protein cleavage signals which may encode the same or different protein cleavage signals.

[0245] In one embodiment, the cell phenotype altering polypeptides, primary constructs and mmRNA can also contain sequences that encode protein cleavage sites so that the cell phenotype altering polypeptides, primary constructs and mmRNA can be released from a carrier region or a fusion partner by treatment with a specific protease for said protein cleavage site.

### III. MODIFICATIONS

[0246] Herein, in a cell phenotype altering polynucleotide (such as a cell phenotype altering primary construct or an mRNA molecule), the terms “modification” or, as appropriate, “modified” refer to modification with respect to A, G, U or C ribonucleotides. Generally, herein, these terms are not intended to refer to the ribonucleotide modifications in naturally occurring 5′-terminal mRNA cap moieties. In a polypeptide, the term “modification” refers to a modification as compared to the canonical set of 20 amino acids, moiety)

[0247] The modifications may be various distinct modifications. In some embodiments, the coding region, the flanking regions and/or the terminal regions may contain one, two, or more (optionally different) nucleoside or nucleotide modifications. In some embodiments, a modified cell phenotype altering polynucleotide, primary construct, or mmRNA introduced to a cell may exhibit reduced degradation in the cell, as compared to an unmodified cell phenotype altering polynucleotide, primary construct, or mmRNA.

[0248] The cell phenotype altering polynucleotides, primary constructs, and mmRNA can include any useful modification, such as to the sugar, the nucleobase, or the internucleoside linkage (e.g. to a linking phosphate/to a phosphodiester linkage/to the phosphodiester backbone). One or more atoms of a pyrimidine nucleobase may be replaced or substituted with optionally substituted amino, optionally substituted thiol, optionally substituted alkyl (e.g., methyl or ethyl), or halo (e.g., chloro or fluoro). In certain embodiments, modifications (e.g., one or more modifications) are present in each of the sugar and the internucleoside linkage. Modifications according to the present invention may be modifications of ribonucleic acids (RNAs) to deoxyribonucleic acids (DNAs), threose nucleic acids (TNAs), glycol nucleic acids (GNAs), peptide nucleic acids (PNAs), locked nucleic acids (LNAs) or hybrids thereof). Additional modifications are described herein.

[0249] As described herein, the cell phenotype altering polynucleotides, primary constructs, and mmRNA of the invention do not substantially induce an innate immune response of a cell into which the mRNA is introduced. Features of an induced innate immune response include 1) increased expression of pro-inflammatory cytokines, 2) activation of intracellular PRRs (RIG-I, MDA5, etc, and/or 3) termination or reduction in protein translation.

[0250] In certain embodiments, it may desirable to intracellularly degrade a modified nucleic acid molecule introduced into the cell. For example, degradation of a modified nucleic acid molecule may be preferable if precise timing of protein production is desired. Thus, in some embodiments, the invention provides a modified cell phenotype altering nucleic acid molecule containing a degradation domain, which is capable of being acted on in a directed manner within a cell.

[0251] The cell phenotype altering polynucleotides, primary constructs, and mmRNA can optionally include other agents (e.g., RNAi-inducing agents, RNAi agents, siRNAs, shRNAs, miRNAs, antisense RNAs, ribozymes, catalytic DNA, tRNA, RNAs that induce triple helix formation, aptamers, vectors, etc.). In some embodiments, the cell phenotype altering polynucleotides, primary constructs, or mmRNA may include one or more messenger RNAs (mRNAs) and one or more modified nucleoside or nucleotides (e.g., mmRNA molecules). Details for these cell phenotype altering polynucleotides, primary constructs, and mmRNA follow.

### Cell Phenotype Altering Polynucleotides and Primary Constructs

[0252] The cell phenotype altering polynucleotides, primary constructs, and mmRNA of the invention includes a first region of linked nucleosides encoding a cell phenotype altering polypeptide of interest, a first flanking region located at the 5′ terminus of the first region, and a second flanking region located at the 3′ terminus of the first region.

[0253] In some embodiments, the cell phenotype altering polynucleotide, primary construct, or mmRNA (e.g., the first region, first flanking region, or second flanking region) includes n number of linked nucleosides having Formula (Ia) or Formula (Ia-1):

[chemical structure]

or a pharmaceutically acceptable salt or stereoisomer thereof,

[0254] wherein

[0255] U is O, S, N(R^{U})ₙᵤ, or C(R^{U})ₙᵤ, wherein nu is an integer from 0 to 2 and each R^{U} is, independently, H, halo, or optionally substituted alkyl;
[0256] [symbol] is a single bond or absent;

[0257] each of R^{1′}, R^{2′}, R^{1″}, R^{2″}, R¹, R², R³, R⁴, and R⁵ is, independently, if present, H, halo, hydroxy, thiol, optionally substituted alkyl, optionally substituted alkoxy, optionally substituted alkenyloxy, optionally substituted alkynyloxy, optionally substituted aminoalkoxy, optionally substituted alkoxyalkoxy, optionally substituted hydroxyalkoxy, optionally substituted amino, azido, optionally substituted aryl, optionally substituted aminoalkyl, optionally substituted aminoalkenyl, optionally substituted aminoalkynyl, or absent; wherein the combination of R³ with one or more of R^{1′}, R^{1″}, R^{2′}, R^{2″}, or R⁵ (e.g., the combination of R^{1′} and R³, the combination of R^{1″} and R³, the combination of R^{2′} and R³, the combination of R^{2″} and R³, or the combination of R⁵ and R³) can join together to form optionally substituted alkylene or optionally substituted heteroalkylene and, taken together with the carbons to which they are attached, provide an optionally substituted heterocyclyl (e.g., a bicyclic, tricyclic, or tetracyclic heterocyclyl); wherein the combination of R⁵ with one or more of R^{1′}, R^{1″}, R^{2′}, or R^{2″} (e.g., the combination of R^{1′} and R⁵, the combination of R^{1″} and R⁵, the combination of R^{2′} and R⁵, or the combination of R^{2″} and R⁵) can join together to form optionally substituted alkylene or optionally substituted heteroalkylene and, taken together with the carbons to which they are attached, provide an optionally substituted heterocyclyl (e.g., a bicyclic, tricyclic, or tetracyclic heterocyclyl); and wherein the combination of R⁴ and one or more of R^{1′}, R^{1″}, R^{2′}, R^{2″}, R³, or R⁵ can join together to form optionally substituted alkylene or optionally substituted heteroalkylene and, taken together with the carbons to which they are attached, provide an optionally substituted heterocyclyl (e.g., a bicyclic, tricyclic, or tetracyclic heterocyclyl); each of m′ and m″ is, independently, an integer from 0 to 3 (e.g., from 0 to 2, from 0 to 1, from 1 to 3, or from 1 to 2);

[0258] each of Y¹, Y², and Y³, is, independently, O, S, Se, —NR^{N1}—, optionally substituted alkylene, or optionally substituted heteroalkylene, wherein R^{N1} is H, optionally substituted alkyl, optionally substituted alkenyl, optionally substituted alkynyl, optionally substituted aryl, or absent;

[0259] each Y⁴ is, independently, H, hydroxy, thiol, boranyl, optionally substituted alkyl, optionally substituted alkenyl, optionally substituted alkynyl, optionally substituted alkoxy, optionally substituted alkenyloxy, optionally substituted alkynyloxy, optionally substituted thioalkoxy, optionally substituted alkoxyalkoxy, or optionally substituted amino;

[0260] each Y⁵ is, independently, O, S, Se, optionally substituted alkylene (e.g., methylene), or optionally substituted heteroalkylene;

[0261] n is an integer from 1 to 100,000; and

[0262] B is a nucleobase (e.g., a purine, a pyrimidine, or derivatives thereof), wherein the combination of B and R^{1′}, the combination of B and R^{2′}, the combination of B and R^{1″}, or the combination of B and R^{2″} can, taken together with the carbons to which they are attached, optionally form a bicyclic group (e.g., a bicyclic heterocyclyl) or wherein the combination of B, R^{1″}, and R³ or the combination of B, R^{2″}, and R³ can optionally form a tricyclic or tetracyclic group (e.g., a tricyclic or tetracyclic heterocyclyl, such as in Formula (IIo)-(IIp) herein). In some embodiments, the cell phenotype altering polynucleotide, primary construct, or mmRNA includes a modified ribose. In some embodiments, the cell phenotype altering polynucleotide, primary construct, or mmRNA (e.g., the first region, the first flanking region, or the second flanking region) includes n number of linked nucleosides having Formula (Ia-2)-(Ia-5) or a pharmaceutically acceptable salt or stereoisomer thereof.

[chemical structure]

[0263] In some embodiments, the cell phenotype altering polynucleotide, primary construct, or mmRNA (e.g., the first region, the first flanking region, or the second flanking region) includes n number of linked nucleosides having Formula (Ib) or Formula (Ib-1):

[chemical structure]

or a pharmaceutically acceptable salt or stereoisomer thereof,

[0264] wherein

[0265] U is O, S, N(R^{U})ₙᵤ, or C(R^{U})ₙᵤ, wherein nu is an integer from 0 to 2 and each R^{U} is, independently, H, halo, or optionally substituted alkyl;

[0266] [symbol] is a single bond or absent;

[0267] each of R¹, R^{3′}, R^{3″}, and R⁴ is, independently, H, halo, hydroxy, optionally substituted alkyl, optionally substituted alkoxy, optionally substituted alkenyloxy, optionally substituted alkynyloxy, optionally substituted aminoalkoxy, optionally substituted alkoxyalkoxy, optionally substituted hydroxyalkoxy, optionally substituted amino, azido, optionally substituted aryl, optionally substituted aminoalkyl, optionally substituted aminoalkenyl, optionally substituted aminoalkynyl, or absent; and wherein the combination of R¹ and R^{3′} or the combination of R¹ and R^{3″} can be taken together to form optionally substituted alkylene or optionally substituted heteroalkylene (e.g., to produce a locked nucleic acid);

[0268] each R⁵ is, independently, H, halo, hydroxy, optionally substituted alkyl, optionally substituted alkoxy, optionally substituted alkenyloxy, optionally substituted alkynyloxy, optionally substituted aminoalkoxy, optionally substituted alkoxyalkoxy, or absent;

[0269] each of Y¹, Y², and Y³ is, independently, O, S, Se, —NR^{N1}—, optionally substituted alkylene, or optionally substituted heteroalkylene, wherein R^{N1} is H, optionally substituted alkyl, optionally substituted alkenyl, optionally substituted alkynyl, or optionally substituted aryl;

[0270] each Y⁴ is, independently, H, hydroxy, thiol, boranyl, optionally substituted alkyl, optionally substituted alkenyl, optionally substituted alkynyl, optionally substituted alkoxy, optionally substituted alkenyloxy, optionally substituted alkynyloxy, optionally substituted alkoxyalkoxy, or optionally substituted amino;

[0271] n is an integer from 1 to 100,000; and

[0272] B is a nucleobase.

[0273] In some embodiments, the cell phenotype altering polynucleotide, primary construct, or mmRNA (e.g., the first region, first flanking region, or second flanking region) includes n number of linked nucleosides having Formula (Ic):

[chemical structure]

or a pharmaceutically acceptable salt or stereoisomer thereof,

[0274] wherein

[0275] U is O, S, N(R^{U})ₙᵤ, or C(R^{U})ₙᵤ, wherein nu is an integer from 0 to 2 and each R^{U} is, independently, H, halo, or optionally substituted alkyl;

[0276] [symbol] is a single bond or absent;

[0277] each of B¹, B², and B³ is, independently, a nucleobase (e.g., a purine, a pyrimidine, or derivatives thereof, as described herein), H, halo, hydroxy, thiol, optionally substituted alkyl, optionally substituted alkoxy, optionally substituted alkenyloxy, optionally substituted alkynyloxy, optionally substituted aminoalkoxy, optionally substituted alkoxyalkoxy, optionally substituted hydroxyalkoxy, optionally substituted amino, azido, optionally substituted aryl, optionally substituted aminoalkyl, optionally substituted aminoalkenyl, or optionally substituted aminoalkynyl, wherein one and only one of B¹, B², and B³ is a nucleobase;

[0278] each of R^{b1}, R^{b2}, R^{b3}, R³, and R⁵ is, independently, H, halo, hydroxy, thiol, optionally substituted alkyl, optionally substituted alkoxy, optionally substituted alkenyloxy, optionally substituted alkynyloxy, optionally substituted aminoalkoxy, optionally substituted alkoxyalkoxy, optionally substituted hydroxyalkoxy, optionally substituted amino, azido, optionally substituted aryl, optionally substituted aminoalkyl, optionally substituted aminoalkenyl or optionally substituted aminoalkynyl;

[0279] each of Y¹, Y², and Y³, is, independently, O, S, Se, —NR^{N1}—, optionally substituted alkylene, or optionally substituted heteroalkylene, wherein R^{N1} is H, optionally substituted alkyl, optionally substituted alkenyl, optionally substituted alkynyl, or optionally substituted aryl;

[0280] each Y⁴ is, independently, H, hydroxy, thiol, boranyl, optionally substituted alkyl, optionally substituted alkenyl, optionally substituted alkynyl, optionally substituted alkoxy, optionally substituted alkenyloxy, optionally substituted alkynyloxy, optionally substituted thioalkoxy, optionally substituted alkoxyalkoxy, or optionally substituted amino;

[0281] each Y⁵ is, independently, O, S, Se, optionally substituted alkylene (e.g., methylene), or optionally substituted heteroalkylene;

[0282] n is an integer from 1 to 100,000; and

[0283] wherein the ring including U can include one or more double bonds.

[0284] In particular embodiments, the ring including U does not have a double bond between U-CB³R^{b3} or between CB³R^{b3}—C^{B2}R^{b2}.

[0285] In some embodiments, the cell phenotype altering polynucleotide, primary construct, or mmRNA (e.g., the first region, first flanking region, or second flanking region) includes n number of linked nucleosides having Formula (Id):

[chemical structure]

or a pharmaceutically acceptable salt or stereoisomer thereof,

[0286] wherein

[0287] U is O, S, N(R^{U})ₙᵤ, or C(R^{U})ₙᵤ, wherein nu is an integer from 0 to 2 and each R^{U} is, independently, H, halo, or optionally substituted alkyl;

[0288] each R³ is, independently, H, halo, hydroxy, thiol, optionally substituted alkyl, optionally substituted alkoxy, optionally substituted alkenyloxy, optionally substituted alkynyloxy, optionally substituted aminoalkoxy, optionally substituted alkoxyalkoxy, optionally substituted hydroxyalkoxy, optionally substituted amino, azido, optionally substituted aryl, optionally substituted aminoalkyl, optionally substituted aminoalkenyl, or optionally substituted aminoalkynyl;

[0289] each of Y¹, Y², and Y³, is, independently, O, S, Se, —NR^{N1}—, optionally substituted alkylene, or optionally substituted heteroalkylene, wherein R^{N1} is H, optionally substituted alkyl, optionally substituted alkenyl, optionally substituted alkynyl, or optionally substituted aryl;

[0290] each Y⁴ is, independently, H, hydroxy, thiol, boranyl, optionally substituted alkyl, optionally substituted alkenyl, optionally substituted alkynyl, optionally substituted alkoxy, optionally substituted alkenyloxy, optionally substituted alkynyloxy, optionally substituted thioalkoxy, optionally substituted alkoxyalkoxy, or optionally substituted amino;

[0291] each Y⁵ is, independently, O, S, optionally substituted alkylene (e.g., methylene), or optionally substituted heteroalkylene;

[0292] n is an integer from 1 to 100,000; and

[0293] B is a nucleobase (e.g., a purine, a pyrimidine, or derivatives thereof).

[0294] In some embodiments, the cell phenotype altering polynucleotide, primary construct, or mmRNA (e.g., the first region, first flanking region, or second flanking region) includes n number of linked nucleosides having Formula (Ie):

[chemical structure]

or a pharmaceutically acceptable salt or stereoisomer thereof,

[0295] wherein

[0296] each of U′ and U″ is, independently, O, S, N(R^{U})ₙᵤ, or C(R^{U})ₙᵤ, wherein nu is an integer from 0 to 2 and each R^{U} is, independently, H, halo, or optionally substituted alkyl;

[0297] each R⁶ is, independently, H, halo, hydroxy, thiol, optionally substituted alkyl, optionally substituted alkoxy, optionally substituted alkenyloxy, optionally substituted alkynyloxy, optionally substituted aminoalkoxy, optionally substituted alkoxyalkoxy, optionally substituted hydroxyalkoxy, optionally substituted amino, azido, optionally substituted aryl, optionally substituted aminoalkyl, optionally substituted aminoalkenyl, or optionally substituted aminoalkynyl;

[0298] each Y^{5′} is, independently, O, S, optionally substituted alkylene (e.g., methylene or ethylene), or optionally substituted heteroalkylene;

[0299] n is an integer from 1 to 100,000; and

[0300] B is a nucleobase (e.g., a purine, a pyrimidine, or derivatives thereof).

[0301] In some embodiments, the cell phenotype altering polynucleotide, primary construct, or mmRNA (e.g., the first region, first flanking region, or second flanking region) includes n number of linked nucleosides having Formula (If) or (If-1):

[chemical structure]

or a pharmaceutically acceptable salt or stereoisomer thereof,

[0302] wherein

[0303] each of U′ and U″ is, independently, O, S, N, N(R^{U})ₙᵤ, or C(R^{U})ₙᵤ, wherein nu is an integer from 0 to 2 and each R^{U} is, independently, H, halo, or optionally substituted alkyl (e.g., U′ is O and U″ is N);

[0304] [symbol] is a single bond or absent;

[0305] each of R^{1′}, R^{2′}, R^{1″}, R^{2″}, R³, and R⁴ is, independently, H, halo, hydroxy, thiol, optionally substituted alkyl, optionally substituted alkoxy, optionally substituted alkenyloxy, optionally substituted alkynyloxy, optionally substituted aminoalkoxy, optionally substituted alkoxyalkoxy, optionally substituted hydroxyalkoxy, optionally substituted amino, azido, optionally substituted aryl, optionally substituted aminoalkyl, optionally substituted aminoalkenyl, optionally substituted aminoalkynyl, or absent; and wherein the combination of R^{1′} and R³, the combination of R^{1′} and R³, the combination of R^{2′} and R³, or the combination of R^{2″} and R³ can be taken together to form optionally substituted alkylene or optionally substituted heteroalkylene (e.g., to produce a locked nucleic acid); each of m′ and m″ is, independently, an integer from 0 to 3 (e.g., from 0 to 2, from 0 to 1, from 1 to 3, or from 1 to 2);

[0306] each of Y¹, Y², and Y³, is, independently, O, S, Se, —NR^{N1}—, optionally substituted alkylene, or optionally substituted heteroalkylene, wherein R^{N1} is H, optionally substituted alkyl, optionally substituted alkenyl, optionally substituted alkynyl, optionally substituted aryl, or absent;

[0307] each Y⁴ is, independently, H, hydroxy, thiol, boranyl, optionally substituted alkyl, optionally substituted alkenyl, optionally substituted alkynyl, optionally substituted alkoxy, optionally substituted alkenyloxy, optionally substituted alkynyloxy, optionally substituted thioalkoxy, optionally substituted alkoxyalkoxy, or optionally substituted amino;

[0308] each Y⁵ is, independently, O, S, Se, optionally substituted alkylene (e.g., methylene), or optionally substituted heteroalkylene;

[0309] n is an integer from 1 to 100,000; and

[0310] B is a nucleobase (e.g., a purine, a pyrimidine, or derivatives thereof).

[0311] In some embodiments of the cell phenotype altering polynucleotides, primary constructs, or mmRNA (e.g., Formulas (Ia), (Ia-1)-(Ia-3), (Ib)-(If), and (IIa)-(IIp)), the ring including U has one or two double bonds.

[0312] In some embodiments of the cell phenotype altering polynucleotides, primary constructs, or mmRNA (e.g., Formulas (Ia)-(Ia-5), (Ib)-(If-1), (IIa)-(IIp), (IIb-1), (IIb-2), (IIc-1)-(IIc-2), (IIn-1), (IIn-2), (IVa)-(IVl), and (IXa)-(IXr)), each of R², R^{2′}, and R^{2″}, if present, is H. In further embodiments, each of R¹, R^{1′}, and R^{1″}, if present, is, independently, H, halo (e.g., fluoro), hydroxy, optionally substituted alkoxy (e.g., methoxy or ethoxy), or optionally substituted alkoxyalkoxy. In particular embodiments, alkoxyalkoxy is —(CH₂)ₛ₂(OCH₂CH₂)ₛ₁(CH₂)ₛ₃OR′, wherein s1 is an integer from 1 to 10 (e.g., from 1 to 6 or from 1 to 4), each of s2 and s3, independently, is an integer from 0 to 10 (e.g., from 0 to 4, from 0 to 6, from 1 to 4, from 1 to 6, or from 1 to 10), and R′ is H or C₁₋₂₀ alkyl). In some embodiments, s2 is 0, s1 is 1 or 2, s3 is 0 or 1, and R′ is C₁₋₆ alkyl.

[0313] In some embodiments of the cell phenotype altering polynucleotides, primary constructs, or mmRNA (e.g., Formulas (Ia)-(Ia-5), (Ib)-(If-1), (IIa)-(IIp), (IIb-1), (IIb-2), (IIc-1)-(IIc-2), (IIn-1), (IIn-2), (IVa)-(IVl), and (IXa)-(IXr)), each of R², R^{2′}, and R^{2″}, if present, is H. In further embodiments, each of R¹, R^{1′}, and R^{1″}, if present, is, independently, H, halo (e.g., fluoro), hydroxy, optionally substituted alkoxy (e.g., methoxy or ethoxy), or optionally substituted alkoxyalkoxy. In particular embodiments, alkoxyalkoxy is —(CH₂)ₛ₂(OCH₂CH₂)ₛ₁(CH₂)ₛ₃OR′, wherein s1 is an integer from 1 to 10 (e.g., from 1 to 6 or from 1 to 4), each of s2 and s3, independently, is an integer from 0 to 10 (e.g., from 0 to 4, from 0 to 6, from 1 to 4, from 1 to 6, or from 1 to 10), and R′ is H or C₁₋₂₀ alkyl). In some embodiments, s2 is 0, s1 is 1 or 2, s3 is 0 or 1, and R′ is C₁₋₆ alkyl.

[0314] In some embodiments of the cell phenotype altering polynucleotides, primary constructs, or mmRNA (e.g., Formulas (Ia)-(Ia-5), (Ib)-(If-1), (IIa)-(IIp), (IIb-1), (IIb-2), (IIc-1)-(IIc-2), (IIn-1), (IIn-2), (IVa)-(IVl), and (IXa)-(IXr)), each of R³, R⁴, and R⁵ is, independently, H, halo (e.g., fluoro), hydroxy, optionally substituted alkyl, optionally substituted alkoxy (e.g., methoxy or ethoxy), or optionally substituted alkoxyalkoxy. In particular embodiments, R³ is H, R⁴ is H, R⁵ is H, or R³, R⁴, and R⁵ are all H. In particular embodiments, R³ is C₁₋₆ alkyl, R⁴ is C₁₋₆ alkyl, R⁵ is C₁₋₆ alkyl, or R³, R⁴, and R⁵ are all C₁₋₆ alkyl. In particular embodiments, R³ and R⁴ are both H, and R⁵ is C₁₋₆ alkyl.

[0315] In some embodiments of the cell phenotype altering polynucleotides, primary constructs, or mmRNA (e.g., Formulas (Ia)-(Ia-5), (Ib)-(If-1), (IIa)-(IIp), (IIb-1), (IIb-2), (IIc-1)-(IIc-2), (IIn-1), (IIn-2), (IVa)-(IVl), and (IXa)-(IXr)), R³ and R⁵ join together to form optionally substituted alkylene or optionally substituted heteroalkylene and, taken together with the carbons to which they are attached, provide an optionally substituted heterocyclyl (e.g., a bicyclic, tricyclic, or tetracyclic heterocyclyl, such as trans-3′,4′ analogs, wherein R³ and R⁵ join together to form heteroalkylene (e.g., —(CH₂)_{b1}O(CH₂)_{b2}O(CH₂)_{b3}—, wherein each of b1, b2, and b3 are, independently, an integer from 0 to 3).

[0316] In some embodiments of the cell phenotype altering polynucleotides, primary constructs, or mmRNA (e.g., Formulas (Ia)-(Ia-5), (Ib)-(If-1), (IIa)-(IIp), (IIb-1), (IIb-2), (IIc-1)-(IIc-2), (IIn-1), (IIn-2), (IVa)-(IVl), and (IXa)-(IXr)), R³ and one or more of R^{1′}, R^{1″}, R^{2′}, R^{2″}, or R⁵ join together to form optionally substituted alkylene or optionally substituted heteroalkylene and, taken together with the carbons to which they are attached, provide an optionally substituted heterocyclyl (e.g., a bicyclic, tricyclic, or tetracyclic heterocyclyl, R³ and one or more of R^{1′}, R^{1″}, R^{2′}, R^{2″}, or R⁵ join together to form heteroalkylene (e.g., —(CH₂)_{b1}O(CH₂)_{b2}O(CH₂)_{b3}—, wherein each of b1, b2, and b3 are, independently, an integer from 0 to 3).

[0317] In some embodiments of the cell phenotype altering polynucleotides, primary constructs, or mmRNA (e.g., Formulas (Ia)-(Ia-5), (Ib)-(If-1), (IIa)-(IIp), (IIb-1), (IIb-2), (IIc-1)-(IIc-2), (IIn-1), (IIn-2), (IVa)-(IVl), and (IXa)-(IXr)), R⁵ and one or more of R^{1′}, R^{1″}, R^{2′}, or R^{2″} join together to form optionally substituted alkylene or optionally substituted heteroalkylene and, taken together with the carbons to which they are attached, provide an optionally substituted heterocyclyl (e.g., a bicyclic, tricyclic, or tetracyclic heterocyclyl, R⁵ and one or more of R^{1′}, R^{1″}, R^{2′}, or R^{2″} join together to form heteroalkylene (e.g., —(CH₂)_{b1}O(CH₂)_{b2}O(CH₂)_{b3}—, wherein each of b1, b2, and b3 are, independently, an integer from 0 to 3).

[0318] In some embodiments of the cell phenotype altering polynucleotides, primary constructs, or mmRNA (e.g., Formulas (Ia)-(Ia-5), (Ib)-(If-1), (IIa)-(IIp), (IIb-1), (IIb-2), (IIc-1)-(IIc-2), (IIn-1), (IIn-2), (IVa)-(IVl), and (IXa)-(IXr)), each Y² is, independently, O, S, or —NR^{N1}—, wherein R^{N1} is H, optionally substituted alkyl, optionally substituted alkenyl, optionally substituted alkynyl, or optionally substituted aryl. In particular embodiments, Y² is NR^{N1}—, wherein R^{N1} is H or optionally substituted alkyl (e.g., C₁₋₆ alkyl, such as methyl, ethyl, isopropyl, or n-propyl).

[0319] In some embodiments of the cell phenotype altering polynucleotides, primary constructs, or mmRNA (e.g., Formulas (Ia)-(Ia-5), (Ib)-(If-1), (IIa)-(IIp), (IIb-1), (IIb-2), (IIc-1)-(IIc-2), (IIn-1), (IIn-2), (IVa)-(IVl), and (IXa)-(IXr)), each Y³ is, independently, O or S.

[0320] In some embodiments of the cell phenotype altering polynucleotides, primary constructs, or mmRNA (e.g., Formulas (Ia)-(Ia-5), (Ib)-(If-1), (IIa)-(IIp), (IIb-1), (IIb-2), (IIc-1)-(IIc-2), (IIn-1), (IIn-2), (IVa)-(IVl), and (IXa)-(IXr)), R¹ is H; each R² is, independently, H, halo (e.g., fluoro), hydroxy, optionally substituted alkoxy (e.g., methoxy or ethoxy), or optionally substituted alkoxyalkoxy (e.g., —(CH₂)ₛ₂(OCH₂CH₂)ₛ₁(CH₂)ₛ₃OR′, wherein s1 is an integer from 1 to 10 (e.g., from 1 to 6 or from 1 to 4), each of s2 and s3, independently, is an integer from 0 to 10 (e.g., from 0 to 4, from 0 to 6, from 1 to 4, from 1 to 6, or from 1 to 10), and R′ is H or C₁₋₂₀ alkyl, such as wherein s2 is 0, s1 is 1 or 2, s3 is 0 or 1, and R′ is C₁₋₆ alkyl); each Y² is, independently, O or —NR^{N1}—, wherein R^{N1} is H, optionally substituted alkyl, optionally substituted alkenyl, optionally substituted alkynyl, or optionally substituted aryl (e.g., wherein R^{N1} is H or optionally substituted alkyl (e.g., C₁₋₆ alkyl, such as methyl, ethyl, isopropyl, or n-propyl)); and each Y³ is, independently, O or S (e.g., S). In further embodiments, R³ is H, halo (e.g., fluoro), hydroxy, optionally substituted alkyl, optionally substituted alkoxy (e.g., methoxy or ethoxy), or optionally substituted alkoxyalkoxy. In yet further embodiments, each Y¹ is, independently, O or —NR^{N1}—, wherein R^{N1} is H, optionally substituted alkyl, optionally substituted alkenyl, optionally substituted alkynyl, or optionally substituted aryl (e.g., wherein R^{N1} is H or optionally substituted alkyl (e.g., C₁₋₆ alkyl, such as methyl, ethyl, isopropyl, or n-propyl)); and each Y⁴ is, independently, H, hydroxy, thiol, optionally substituted alkyl, optionally substituted alkoxy, optionally substituted thioalkoxy, optionally substituted alkoxyalkoxy, or optionally substituted amino.

[0321] In some embodiments of the cell phenotype altering polynucleotides, primary constructs, or mmRNA (e.g., Formulas (Ia)-(Ia-5), (Ib)-(If-1), (IIa)-(IIp), (IIb-1), (IIb-2), (IIc-1)-(IIc-2), (IIn-1), (IIn-2), (IVa)-(IVl), and (IXa)-(IXr)), each R¹ is, independently, H, halo (e.g., fluoro), hydroxy, optionally substituted alkoxy (e.g., methoxy or ethoxy), or optionally substituted alkoxyalkoxy (e.g., —(CH₂)ₛ₂(OCH₂CH₂)ₛ₁(CH₂)ₛ₃OR′, wherein s1 is an integer from 1 to 10 (e.g., from 1 to 6 or from 1 to 4), each of s2 and s3, independently, is an integer from 0 to 10 (e.g., from 0 to 4, from 0 to 6, from 1 to 4, from 1 to 6, or from 1 to 10), and R′ is H or C₁₋₂₀ alkyl, such as wherein s2 is 0, s1 is 1 or 2, s3 is 0 or 1, and R′ is C₁₋₆ alkyl); R² is H; each Y² is, independently, O or —NR^{N1}—, wherein R^{N1} is H, optionally substituted alkyl, optionally substituted alkenyl, optionally substituted alkynyl, or optionally substituted aryl (e.g., wherein R^{N1} is H or optionally substituted alkyl (e.g., C₁₋₆ alkyl, such as methyl, ethyl, isopropyl, or n-propyl)); and each Y³ is, independently, O or S (e.g., S). In further embodiments, R³ is H, halo (e.g., fluoro), hydroxy, optionally substituted alkyl, optionally substituted alkoxy (e.g., methoxy or ethoxy), or optionally substituted alkoxyalkoxy. In yet further embodiments, each Y¹ is, independently, O or —NR^{N1}—, wherein R^{N1} is H, optionally substituted alkyl, optionally substituted alkenyl, optionally substituted alkynyl, or optionally substituted aryl (e.g., wherein R^{N1} is H or optionally substituted alkyl (e.g., C₁₋₆ alkyl, such as methyl, ethyl, isopropyl, or n-propyl)); and each Y⁴ is, independently, H, hydroxy, thiol, optionally substituted alkyl, optionally substituted alkoxy, optionally substituted thioalkoxy, optionally substituted alkoxyalkoxy, or optionally substituted amino.

[0322] In some embodiments of the cell phenotype altering polynucleotides, primary constructs, or mmRNA (e.g., Formulas (Ia)-(Ia-5), (Ib)-(If-1), (IIa)-(IIp), (IIb-1), (IIb-2), (IIc-1)-(IIc-2), (IIn-1), (IIn-2), (IVa)-(IVl), and (IXa)-(IXr)), the ring including U is in the β-D (e.g., β-D-ribo) configuration.

[0323] In some embodiments of the cell phenotype altering polynucleotides, primary constructs, or mmRNA (e.g., Formulas (Ia)-(Ia-5), (Ib)-(If-1), (IIa)-(IIp), (IIb-1), (IIb-2), (IIc-1)-(IIc-2), (IIn-1), (IIn-2), (IVa)-(IVl), and (IXa)-(IXr)), the ring including U is in the α-L (e.g., α-L-ribo) configuration.

[0324] In some embodiments of the cell phenotype altering polynucleotides, primary constructs, or mmRNA (e.g., Formulas (Ia)-(Ia-5), (Ib)-(If-1), (IIa)-(IIp), (IIb-1), (IIb-2), (IIc-1)-(IIc-2), (IIn-1), (IIn-2), (IVa)-(IVl), and (IXa)-(IXr)), one or more B is not pseudouridine (ψ) or 5-methyl-cytidine (m⁵C). In some embodiments, about 10% to about 100% of n number of B nucleobases is not ψ or m⁵C (e.g., from 10% to 20%, from 10% to 35%, from 10% to 50%, from 10% to 60%, from 10% to 75%, from 10% to 90%, from 10% to 95%, from 10% to 98%, from 10% to 99%, from 20% to 35%, from 20% to 50%, from 20% to 60%, from 20% to 75%, from 20% to 90%, from 20% to 95%, from 20% to 98%, from 20% to 99%, from 20% to 100%, from 50% to 60%, from 50% to 75%, from 50% to 90%, from 50% to 95%, from 50% to 98%, from 50% to 99%, from 50% to 100%, from 75% to 90%, from 75% to 95%, from 75% to 98%, from 75% to 99%, and from 75% to 100% of n number of B is not ψ or m⁵C). In some embodiments, B is not ψ or m⁵C.

[0325] In some embodiments of the cell phenotype altering polynucleotides, primary constructs, or mmRNA (e.g., Formulas (Ia)-(Ia-5), (Ib)-(If-1), (IIa)-(IIp), (IIb-1), (IIb-2), (IIc-1)-(IIc-2), (IIn-1), (IIn-2), (IVa)-(IVl), and (IXa)-(IXr)), when B is an unmodified nucleobase selected from cytosine, guanine, uracil and adenine, then at least one of Y¹, Y², or Y³ is not 0.

[0326] In some embodiments, the cell phenotype altering polynucleotide, primary construct, or mmRNA includes a modified ribose. In some embodiments, the polynucleotide, primary construct, or mmRNA (e.g., the first region, the first flanking region, or the second flanking region) includes n number of linked nucleosides having Formula (IIa)-(IIc):

[chemical structure]

or a pharmaceutically acceptable salt or stereoisomer thereof. In particular embodiments, U is O or C(R^{U})ₙᵤ, wherein nu is an integer from 0 to 2 and each R^{U} is, independently, H, halo, or optionally substituted alkyl (e.g., U is —CH₂— or —CH—). In other embodiments, each of R¹, R², R³, R⁴, and R⁵ is, independently, H, halo, hydroxy, thiol, optionally substituted alkyl, optionally substituted alkoxy, optionally substituted alkenyloxy, optionally substituted alkynyloxy, optionally substituted aminoalkoxy, optionally substituted alkoxyalkoxy, optionally substituted hydroxyalkoxy, optionally substituted amino, azido, optionally substituted aryl, optionally substituted aminoalkyl, optionally substituted aminoalkenyl, optionally substituted aminoalkynyl, or absent (e.g., each R¹ and R² is, independently, H, halo, hydroxy, optionally substituted alkyl, or optionally substituted alkoxy; each R³ and R⁴ is, independently, H or optionally substituted alkyl; and R⁵ is H or hydroxy), and [symbol] is a single bond or double bond.

[0327] In particular embodiments, the cell phenotype altering polynucleotides or mmRNA includes n number of linked nucleosides having Formula (IIb-1)-(IIb-2):

[chemical structure]

or a pharmaceutically acceptable salt or stereoisomer thereof. In some embodiments, U is O or C(R^{U})ₙᵤ, wherein nu is an integer from 0 to 2 and each R^{U} is, independently, H, halo, or optionally substituted alkyl (e.g., U is —CH₂— or —CH—). In other embodiments, each of R¹ and R² is, independently, H, halo, hydroxy, thiol, optionally substituted alkyl, optionally substituted alkoxy, optionally substituted alkenyloxy, optionally substituted alkynyloxy, optionally substituted aminoalkoxy, optionally substituted alkoxyalkoxy, optionally substituted hydroxyalkoxy, optionally substituted amino, azido, optionally substituted aryl, optionally substituted aminoalkyl, optionally substituted aminoalkenyl, optionally substituted aminoalkynyl, or absent (e.g., each R¹ and R² is, independently, H, halo, hydroxy, optionally substituted alkyl, or optionally substituted alkoxy, e.g., H, halo, hydroxy, alkyl, or alkoxy). In particular embodiments, R² is hydroxy or optionally substituted alkoxy (e.g., methoxy, ethoxy, or any described herein).

[0328] In particular embodiments, the cell phenotype altering polynucleotide, primary construct, or mmRNA includes n number of linked nucleosides having Formula (IIc-1)-(IIc-4):

[chemical structure]

or a pharmaceutically acceptable salt or stereoisomer thereof. In some embodiments, U is O or C(R^{U})ₙᵤ, wherein nu is an integer from 0 to 2 and each R^{U} is, independently, H, halo, or optionally substituted alkyl (e.g., U is —CH₂— or —CH—). In some embodiments, each of R¹, R², and R³ is, independently, H, halo, hydroxy, thiol, optionally substituted alkyl, optionally substituted alkoxy, optionally substituted alkenyloxy, optionally substituted alkynyloxy, optionally substituted aminoalkoxy, optionally substituted alkoxyalkoxy, optionally substituted hydroxyalkoxy, optionally substituted amino, azido, optionally substituted aryl, optionally substituted aminoalkyl, optionally substituted aminoalkenyl, optionally substituted aminoalkynyl, or absent (e.g., each R¹ and R² is, independently, H, halo, hydroxy, optionally substituted alkyl, or optionally substituted alkoxy, e.g., H, halo, hydroxy, alkyl, or alkoxy; and each R³ is, independently, H or optionally substituted alkyl)). In particular embodiments, R² is optionally substituted alkoxy (e.g., methoxy or ethoxy, or any described herein). In particular embodiments, R¹ is optionally substituted alkyl, and R² is hydroxy. In other embodiments, R¹ is hydroxy, and R² is optionally substituted alkyl. In further embodiments, R³ is optionally substituted alkyl.

[0329] In some embodiments, the cell phenotype altering polynucleotide, primary construct, or mmRNA includes an acyclic modified ribose. In some embodiments, the cell phenotype altering polynucleotide, primary construct, or mmRNA (e.g., the first region, the first flanking region, or the second flanking region) includes n number of linked nucleosides having Formula (IId)-(IIf):

[chemical structure]

or a pharmaceutically acceptable salt or stereoisomer thereof

[0330] In some embodiments, the cell phenotype altering polynucleotide, primary construct, or mmRNA includes an acyclic modified hexitol. In some embodiments, the cell phenotype altering polynucleotide, primary construct, or mmRNA (e.g., the first region, the first flanking region, or the second flanking region) includes n number of linked nucleosides Formula (IIg)-(IIj):

[chemical structure]

or a pharmaceutically acceptable salt or stereoisomer thereof

[0331] In some embodiments, the cell phenotype altering polynucleotide, primary construct, or mmRNA includes a sugar moiety having a contracted or an expanded ribose ring. In some embodiments, the cell phenotype altering polynucleotide, primary construct, or mmRNA (e.g., the first region, the first flanking region, or the second flanking region) includes n number of linked nucleosides having Formula (IIk)-(IIm):

[chemical structure]

or a pharmaceutically acceptable salt or stereoisomer thereof, wherein each of R^{1′}, R^{1″}, R^{2′}, and R^{2″} is, independently, H, halo, hydroxy, optionally substituted alkyl, optionally substituted alkoxy, optionally substituted alkenyloxy, optionally substituted alkynyloxy, optionally substituted aminoalkoxy, optionally substituted alkoxyalkoxy, or absent; and wherein the combination of R^{2′} and R³ or the combination of R^{2″} and R³ can be taken together to form optionally substituted alkylene or optionally substituted heteroalkylene.

[0332] In some embodiments, the cell phenotype altering polynucleotide, primary construct, or mmRNA includes a locked modified ribose. In some embodiments, the cell phenotype altering polynucleotide, primary construct, or mmRNA (e.g., the first region, the first flanking region, or the second flanking region) includes n number of linked nucleosides having Formula (IIn):

[chemical structure]

or a pharmaceutically acceptable salt or stereoisomer thereof, wherein R^{3′} is O, S, or —NR^{N1}—, wherein R^{N1} is H, optionally substituted alkyl, optionally substituted alkenyl, optionally substituted alkynyl, or optionally substituted aryl and R^{3″} is optionally substituted alkylene (e.g., —CH₂—, —CH₂CH₂—, or —CH₂CH₂CH₂—) or optionally substituted heteroalkylene (e.g., —CH₂NH—, —CH₂CH₂NH—, —CH₂OCH₂—, or —CH₂CH₂OCH₂—)(e.g., R^{3′} is O and R^{3″} is optionally substituted alkylene (e.g., —CH₂—, —CH₂CH₂—, or —CH₂CH₂CH₂—)).

[0333] In some embodiments, the cell phenotype altering polynucleotide, primary construct, or mmRNA includes n number of linked nucleosides having Formula (IIn-1)-(II-n2):

[chemical structure]

or a pharmaceutically acceptable salt or stereoisomer thereof, wherein R^{3′} is O, S, or —NR^{N1}—, wherein R^{N1} is H, optionally substituted alkyl, optionally substituted alkenyl, optionally substituted alkynyl, or optionally substituted aryl and R^{3″} is optionally substituted alkylene (e.g., —CH₂—, —CH₂CH₂—, or —CH₂CH₂CH₂—) or optionally substituted heteroalkylene (e.g., —CH₂NH—, —CH₂CH₂NH—, —CH₂OCH₂—, or —CH₂CH₂OCH₂—) (e.g., R^{3′} is O and R^{3″} is optionally substituted alkylene (e.g., —CH₂—, —CH₂CH₂—, or —CH₂CH₂CH₂—)).

[0334] In some embodiments, the cell phenotype altering polynucleotide, primary construct, or mmRNA includes a locked modified ribose that forms a tetracyclic heterocyclyl. In some embodiments, the cell phenotype altering polynucleotide, primary construct, or mmRNA (e.g., the first region, the first flanking region, or the second flanking region) includes n number of linked nucleosides having Formula (IIo):

[chemical structure]

or a pharmaceutically acceptable salt or stereoisomer thereof, wherein R^{12a}, R^{12c}, T^{1′}, T^{1″}, T^{2′}, T^{2″}, V¹, and V³ are as described herein.

[0335] Any of the formulas for the cell phenotype altering polynucleotides, primary constructs, or mmRNA can include one or more nucleobases described herein (e.g., Formulas (b1)-(b43)).

[0336] In one embodiment, the present invention provides methods of preparing a cell phenotype altering polynucleotide, primary construct, or mmRNA comprising at least one nucleotide, wherein the cell phenotype altering polynucleotide comprises n number of nucleosides having Formula (Ia), as defined herein:

[chemical structure]

the method comprising reacting a compound of Formula (IIIa), as defined herein:

[chemical structure]

with an RNA polymerase, and a cDNA template.

[0337] In a further embodiment, the present invention provides methods of amplifying a cell phenotype altering polynucleotide, primary construct, or mmRNA comprising at least one nucleotide (e.g., mmRNA molecule), the method comprising: reacting a compound of Formula (IIIa), as defined herein, with a primer, a cDNA template, and an RNA polymerase.

[0338] In one embodiment, the present invention provides methods of preparing a cell phenotype altering polynucleotide, primary construct, or mmRNA comprising at least one nucleotide (e.g., mmRNA molecule), wherein the cell phenotype altering polynucleotide comprises n number of nucleosides having Formula (Ia-1), as defined herein:

[chemical structure]

the method comprising reacting a compound of Formula (IIIa-1), as defined herein:

[chemical structure]

with an RNA polymerase, and a cDNA template.

[0339] In a further embodiment, the present invention provides methods of amplifying a cell phenotype altering polynucleotide, primary construct, or mmRNA comprising at least one nucleotide (e.g., mmRNA molecule), the method comprising: reacting a compound of Formula (IIIa-1), as defined herein, with a primer, a cDNA template, and an RNA polymerase.

[0340] In one embodiment, the present invention provides methods of preparing a modified cell phenotype altering mRNA comprising at least one nucleotide (e.g., mmRNA molecule), wherein the polynucleotide comprises n number of nucleosides having Formula (Ia-2), as defined herein:

[chemical structure]

the method comprising reacting a compound of Formula (IIIa-2), as defined herein:

[chemical structure]

with an RNA polymerase, and a cDNA template.

[0341] In a further embodiment, the present invention provides methods of amplifying a modified cell phenotype altering mRNA comprising at least one nucleotide (e.g., mmRNA molecule), the method comprising: reacting a compound of Formula (IIIa-2), as defined herein, with a primer, a cDNA template, and an RNA polymerase.

[0342] In some embodiments, the reaction may be repeated from 1 to about 7,000 times. In any of the embodiments herein, B may be a nucleobase of Formula (b1)-(b43).

[0343] The cell phenotype altering polynucleotides, primary constructs, and mmRNA can optionally include 5′ and/or 3′ flanking regions, which are described herein.

Modified Cell Phenotype Altering RNA (mmRNA) Molecules

[0344] The present invention also includes building blocks, e.g., modified ribonucleosides, modified ribonucleotides, of modified RNA (mmRNA) molecules. For example, these building blocks can be useful for preparing the cell phenotype altering polynucleotides, primary constructs, or mmRNA of the invention.

[0345] In some embodiments, the building block molecule has Formula (IIIa) or (IIIa-1):

[chemical structure]

or a pharmaceutically acceptable salt or stereoisomer thereof, wherein the substituents are as described herein (e.g., for Formula (Ia) and (Ia-1)), and wherein when B is an unmodified nucleobase selected from cytosine, guanine, uracil and adenine, then at least one of Y¹, Y², or Y³ is not 0.

[0346] In some embodiments, the building block molecule, which may be incorporated into a cell phenotype altering polynucleotide, primary construct, or mmRNA, has Formula (IVa)-(IVb):

[chemical structure]

or a pharmaceutically acceptable salt or stereoisomer thereof, wherein B is as described herein (e.g., any one of (b1)-(b43)). In particular embodiments, Formula (IVa) or (IVb) is combined with a modified uracil (e.g., any one of formulas (b1)-(b9), (b21)-(b23), and (b28)-(b31), such as formula (b1), (b8), (b28), (b29), or (b30)). In particular embodiments, Formula (IVa) or (IVb) is combined with a modified cytosine (e.g., any one of formulas (b10)-(b14), (b24), (b25), and (b32)-(b36), such as formula (b10) or (b32)). In particular embodiments, Formula (IVa) or (IVb) is combined with a modified guanine (e.g., any one of formulas (b15)-(b17) and (b37)-(b40)). In particular embodiments, Formula (IVa) or (IVb) is combined with a modified adenine (e.g., any one of formulas (b18)-(b20) and (b41)-(b43)).

[0347] In some embodiments, the building block molecule, which may be incorporated into a cell phenotype altering polynucleotide, primary construct, or mmRNA, has Formula (IVc)-(IVk):

[chemical structure]

[chemical structure]

or a pharmaceutically acceptable salt or stereoisomer thereof, wherein B is as described herein (e.g., any one of (b1)-(b43)). In particular embodiments, one of Formulas (IVc)-(IVk) is combined with a modified uracil (e.g., any one of formulas (b1)-(b9), (b21)-(b23), and (b28)-(b31), such as formula (b1), (b8), (b28), (b29), or (b30)). In particular embodiments, one of Formulas (IVc)-(IVk) is combined with a modified cytosine (e.g., any one of formulas (b10)-(b14), (b24), (b25), and (b32)-(b36), such as formula (b10) or (b32)). In particular embodiments, one of Formulas (IVc)-(IVk) is combined with a modified guanine (e.g., any one of formulas (b15)-(b17) and (b37)-(b40)). In particular embodiments, one of Formulas (IVc)-(IVk) is combined with a modified adenine (e.g., any one of formulas (b18)-(b20) and (b41)-(b43)).

[0348] In other embodiments, the building block molecule, which may be incorporated into a cell phenotype altering polynucleotide, primary construct, or mmRNA, has Formula (Va) or (Vb):

[chemical structure]

or a pharmaceutically acceptable salt or stereoisomer thereof, wherein B is as described herein (e.g., any one of (b1)-(b43)).

[0349] In other embodiments, the building block molecule, which may be incorporated into a cell phenotype altering polynucleotide, primary construct, or mmRNA, has Formula (IXa)-(IXd):

[chemical structure]

or a pharmaceutically acceptable salt or stereoisomer thereof, wherein B is as described herein (e.g., any one of (b1)-(b43)). In particular embodiments, one of Formulas (IXa)-(IXd) is combined with a modified uracil (e.g., any one of formulas (b1)-(b9), (b21)-(b23), and (b28)-(b31), such as formula (b1), (b8), (b28), (b29), or (b30)). In particular embodiments, one of Formulas (IXa)-(IXd) is combined with a modified cytosine (e.g., any one of formulas (b10)-(b14), (b24), (b25), and (b32)-(b36), such as formula (b10) or (b32)). In particular embodiments, one of Formulas (IXa)-(IXd) is combined with a modified guanine (e.g., any one of formulas (b15)-(b17) and (b37)-(b40)). In particular embodiments, one of Formulas (IXa)-(IXd) is combined with a modified adenine (e.g., any one of formulas (b18)-(b20) and (b41)-(b43)).

[0350] In other embodiments, the building block molecule, which may be incorporated into a cell phenotype altering polynucleotide, primary construct, or mmRNA, has Formula (IXe)-(IXg):

[chemical structure]

or a pharmaceutically acceptable salt or stereoisomer thereof, wherein B is as described herein (e.g., any one of (b1)-(b43)). In particular embodiments, one of Formulas (IXe)-(IXg) is combined with a modified uracil (e.g., any one of formulas (b1)-(b9), (b21)-(b23), and (b28)-(b31), such as formula (b1), (b8), (b28), (b29), or (b30)). In particular embodiments, one of Formulas (IXe)-(IXg) is combined with a modified cytosine (e.g., any one of formulas (b10)-(b14), (b24), (b25), and (b32)-(b36), such as formula (b10) or (b32)). In particular embodiments, one of Formulas (IXe)-(IXg) is combined with a modified guanine (e.g., any one of formulas (b15)-(b17) and (b37)-(b40)). In particular embodiments, one of Formulas (IXe)-(IXg) is combined with a modified adenine (e.g., any one of formulas (b18)-(b20) and (b41)-(b43)).

[0351] In other embodiments, the building block molecule, which may be incorporated into a cell phenotype altering polynucleotide, primary construct, or mmRNA, has Formula (IXh)-(IXk):

[chemical structure]

or a pharmaceutically acceptable salt or stereoisomer thereof, wherein B is as described herein (e.g., any one of (b1)-(b43)). In particular embodiments, one of Formulas (IXh)-(IXk) is combined with a modified uracil (e.g., any one of formulas (b1)-(b9), (b21)-(b23), and (b28)-(b31), such as formula (b1), (b8), (b28), (b29), or (b30)). In particular embodiments, one of Formulas (IXh)-(IXk) is combined with a modified cytosine (e.g., any one of formulas (b10)-(b14), (b24), (b25), and (b32)-(b36), such as formula (b10) or (b32)). In particular embodiments, one of Formulas (IXh)-(IXk) is combined with a modified guanine (e.g., any one of formulas (b15)-(b17) and (b37)-(b40)). In particular embodiments, one of Formulas (IXh)-(IXk) is combined with a modified adenine (e.g., any one of formulas (b18)-(b20) and (b41)-(b43)).

[0352] In other embodiments, the building block molecule, which may be incorporated into a cell phenotype altering polynucleotide, primary construct, or mmRNA, has Formula (IXl)-(IXr):

[chemical structure]

(IXr) or a pharmaceutically acceptable salt or stereoisomer thereof, wherein each r1 and r2 is, independently, an integer from 0 to 5 (e.g., from 0 to 3, from 1 to 3, or from 1 to 5) and B is as described herein (e.g., any one of (b1)-(b43)). In particular embodiments, one of Formulas (IXl)-(IXr) is combined with a modified uracil (e.g., any one of formulas (b1)-(b9), (b21)-(b23), and (b28)-(b31), such as formula (b1), (b8), (b28), (b29), or (b30)). In particular embodiments, one of Formulas (IXl)-(IXr) is combined with a modified cytosine (e.g., any one of formulas (b10)-(b14), (b24), (b25), and (b32)-(b36), such as formula (b10) or (b32)). In particular embodiments, one of Formulas (IXl)-(IXr) is combined with a modified guanine (e.g., any one of formulas (b15)-(b17) and (b37)-(b40)). In particular embodiments, one of Formulas (IXl)-(IXr) is combined with a modified adenine (e.g., any one of formulas (b18)-(b20) and (b41)-(b43)).

[0353] In some embodiments, the building block molecule, which may be incorporated into a cell phenotype altering polynucleotide, primary construct, or mmRNA, can be selected from the group consisting of:

[chemical structure]

[chemical structure]

or a pharmaceutically acceptable salt or stereoisomer thereof, wherein each r is, independently, an integer from 0 to 5 (e.g., from 0 to 3, from 1 to 3, or from 1 to 5). In some embodiments, the building block molecule, which may be incorporated into a cell phenotype altering polynucleotide, primary construct, or mmRNA, can be selected from the group consisting of:

[chemical structure]

[chemical structure]

or a pharmaceutically acceptable salt or stereoisomer thereof, wherein each r is, independently, an integer from 0 to 5 (e.g., from 0 to 3, from 1 to 3, or from 1 to 5) and s1 is as described herein.

[0354] In some embodiments, the building block molecule, which may be incorporated into a cell phenotype altering nucleic acid (e.g., RNA, mRNA, polynucleotide, primary construct, or mmRNA), is a modified uridine (e.g., selected from the group consisting of:

[chemical structure]

[chemical structure]

[chemical structure]

[chemical structure]

[chemical structure]

[chemical structure]

[chemical structure]

[chemical structure]

[chemical structure]

[chemical structure]

[chemical structure]

[chemical structure]

[chemical structure]

[chemical structure]

[chemical structure]

[chemical structure]

[chemical structure]

[chemical structure]

[chemical structure]

[chemical structure]

[chemical structure]

or a pharmaceutically acceptable salt or stereoisomer thereof, wherein Y¹, Y³, Y⁴, Y⁶, and r are as described herein (e.g., each r is, independently, an integer from 0 to 5, such as from 0 to 3, from 1 to 3, or from 1 to 5)).

[0355] In some embodiments, the building block molecule, which may be incorporated into a cell phenotype altering polynucleotide, primary construct, or mmRNA, is a modified cytidine (e.g., selected from the group consisting of:

[chemical structure]

[chemical structure]

[chemical structure]

[chemical structure]

[chemical structure]

[chemical structure]

or a pharmaceutically acceptable salt or stereoisomer thereof, wherein Y¹, Y³, Y⁴, Y⁶, and r are as described herein (e.g., each r is, independently, an integer from 0 to 5, such as from 0 to 3, from 1 to 3, or from 1 to 5)). For example, the building block molecule, which may be incorporated into a cell phenotype altering polynucleotide, primary construct, or mmRNA, can be:

[chemical structure]

or a pharmaceutically acceptable salt or stereoisomer thereof, wherein each r is, independently, an integer from 0 to 5 (e.g., from 0 to 3, from 1 to 3, or from 1 to 5).

[0356] In some embodiments, the building block molecule, which may be incorporated into a cell phenotype altering polynucleotide, primary construct, or mmRNA, is a modified adenosine (e.g., selected from the group consisting of:

[chemical structure]

[chemical structure]

[chemical structure]

[chemical structure]

[chemical structure]

[chemical structure]

[chemical structure]

[chemical structure]

or a pharmaceutically acceptable salt or stereoisomer thereof, wherein Y¹, Y³, Y⁴, Y⁶, and r are as described herein (e.g., each r is, independently, an integer from 0 to 5, such as from 0 to 3, from 1 to 3, or from 1 to 5)).

[0357] In some embodiments, the building block molecule, which may be incorporated into a cell phenotype altering polynucleotide, primary construct, or mmRNA, is a modified guanosine (e.g., selected from the group consisting of:

[chemical structure]

[chemical structure]

[chemical structure]

[chemical structure]

[chemical structure]

[chemical structure]

[chemical structure]

or a pharmaceutically acceptable salt or stereoisomer thereof, wherein Y¹, Y³, Y⁴, Y⁶, and r are as described herein (e.g., each r is, independently, an integer from 0 to 5, such as from 0 to 3, from 1 to 3, or from 1 to 5)).

[0358] In some embodiments, the chemical modification can include replacement of C group at C-5 of the ring (e.g., for a pyrimidine nucleoside, such as cytosine or uracil) with N (e.g., replacement of the >CH group at C-5 with >NR^{N1} group, wherein R^{N}1 is H or optionally substituted alkyl). For example, the building block molecule, which may be incorporated into a cell phenotype altering polynucleotide, primary construct, or mmRNA, can be:

[chemical structure]

or a pharmaceutically acceptable salt or stereoisomer thereof, wherein each r is, independently, an integer from 0 to 5 (e.g., from 0 to 3, from 1 to 3, or from 1 to 5).

[0359] In another embodiment, the chemical modification can include replacement of the hydrogen at C-5 of cytosine with halo (e.g., Br, Cl, F, or I) or optionally substituted alkyl (e.g., methyl). For example, the building block molecule, which may be incorporated into a cell phenotype altering polynucleotide, primary construct, or mmRNA, can be:

[chemical structure]

or a pharmaceutically acceptable salt or stereoisomer thereof, wherein each r is, independently, an integer from 0 to 5 (e.g., from 0 to 3, from 1 to 3, or from 1 to 5).

[0360] In yet a further embodiment, the chemical modification can include a fused ring that is formed by the NH₂ at the C-4 position and the carbon atom at the C-5 position. For example, the building block molecule, which may be incorporated into a cell phenotype altering polynucleotide, primary construct, or mmRNA, can be:

[chemical structure]

or a pharmaceutically acceptable salt or stereoisomer thereof, wherein each r is, independently, an integer from 0 to 5 (e.g., from 0 to 3, from 1 to 3, or from 1 to 5).

### Modifications on the Sugar

[0361] The modified nucleosides and nucleotides (e.g., building block molecules), which may be incorporated into a cell phenotype altering polynucleotide, primary construct, or mmRNA (e.g., RNA or mRNA, as described herein), can be modified on the sugar of the ribonucleic acid. For example, the 2′ hydroxyl group (OH) can be modified or replaced with a number of different substituents. Exemplary substitutions at the 2′-position include, but are not limited to, H, halo, optionally substituted C₁₋₆ alkyl; optionally substituted C₁₋₆ alkoxy; optionally substituted C₆₋₁₀ aryloxy; optionally substituted C₃₋₈ cycloalkyl; optionally substituted C₃₋₈ cycloalkoxy; optionally substituted C₆₋₁₀ aryloxy; optionally substituted C₆₋₁₀ aryl-C₁₋₆ alkoxy, optionally substituted C₁₋₁₂ (heterocyclyl)oxy; a sugar (e.g., ribose, pentose, or any described herein); a polyethyleneglycol (PEG), —O(CH₂CH₂O)ₙCH₂CH₂OR, where R is H or optionally substituted alkyl, and n is an integer from 0 to 20 (e.g., from 0 to 4, from 0 to 8, from 0 to 10, from 0 to 16, from 1 to 4, from 1 to 8, from 1 to 10, from 1 to 16, from 1 to 20, from 2 to 4, from 2 to 8, from 2 to 10, from 2 to 16, from 2 to 20, from 4 to 8, from 4 to 10, from 4 to 16, and from 4 to 20); “locked” nucleic acids (LNA) in which the 2′-hydroxyl is connected by a C₁₋₆ alkylene or C₁₋₆ heteroalkylene bridge to the 4′-carbon of the same ribose sugar, where exemplary bridges included methylene, propylene, ether, or amino bridges; aminoalkyl, as defined herein; aminoalkoxy, as defined herein; amino as defined herein; and amino acid, as defined herein

[0362] Generally, RNA includes the sugar group ribose, which is a 5-membered ring having an oxygen. Exemplary, non-limiting modified nucleotides include replacement of the oxygen in ribose (e.g., with S, Se, or alkylene, such as methylene or ethylene); addition of a double bond (e.g., to replace ribose with cyclopentenyl or cyclohexenyl); ring contraction of ribose (e.g., to form a 4-membered ring of cyclobutane or oxetane); ring expansion of ribose (e.g., to form a 6- or 7-membered ring having an additional carbon or heteroatom, such as for anhydrohexitol, altritol, mannitol, cyclohexanyl, cyclohexenyl, and morpholino that also has a phosphoramidate backbone); multicyclic forms (e.g., tricyclo; and “unlocked” forms, such as glycol nucleic acid (GNA) (e.g., R-GNA or S-GNA, where ribose is replaced by glycol units attached to phosphodiester bonds), threose nucleic acid (TNA, where ribose is replace with α-L-threofuranosyl-(3′→2′)), and peptide nucleic acid (PNA, where 2-amino-ethyl-glycine linkages replace the ribose and phosphodiester backbone). The sugar group can also contain one or more carbons that possess the opposite stereochemical configuration than that of the corresponding carbon in ribose. Thus, a cell phenotype altering polynucleotide, primary construct, or mmRNA molecule can include nucleotides containing, e.g., arabinose, as the sugar.

### Modifications on the Nucleobase

[0363] The present disclosure provides for modified nucleosides and nucleotides. As described herein “nucleoside” is defined as a compound containing a sugar molecule (e.g., a pentose or ribose) or a derivative thereof in combination with an organic base (e.g., a purine or pyrimidine) or a derivative thereof (also referred to herein as “nucleobase”). As described herein, “nucleotide” is defined as a nucleoside including a phosphate group. In some embodiments, the nucleosides and nucleotides described herein are generally chemically modified. Exemplary non-limiting modifications include an amino group, a thiol group, an alkyl group, a halo group, or any described herein. The modified nucleotides may by synthesized by any useful method, as described herein (e.g., chemically, enzymatically, or recombinantly to include one or more modified or non-natural nucleosides).

[0364] The modified nucleotide base pairing encompasses not only the standard adenosine-thymine, adenosine-uracil, or guanosine-cytosine base pairs, but also base pairs formed between nucleotides and/or modified nucleotides comprising non-standard or modified bases, wherein the arrangement of hydrogen bond donors and hydrogen bond acceptors permits hydrogen bonding between a non-standard base and a standard base or between two complementary non-standard base structures. One example of such non-standard base pairing is the base pairing between the modified nucleotide inosine and adenine, cytosine or uracil.

[0365] The modified nucleosides and nucleotides can include a modified nucleobase. Examples of nucleobases found in RNA include, but are not limited to, adenine, guanine, cytosine, and uracil. Examples of nucleobase found in DNA include, but are not limited to, adenine, guanine, cytosine, and thymine. These nucleobases can be modified or wholly replaced to provide polynucleotides, primary constructs, or mmRNA molecules having enhanced properties, e.g., resistance to nucleases through disruption of the binding of a major groove binding partner. Table 8 below identifies the chemical faces of each canonical nucleotide. Circles identify the atoms comprising the respective chemical regions.

TABLE 8

| | | | | Watson-Crick |
|---|---|---|---|---|
| | | Major Groove | Minor Groove | Base-pairing |
| | | Face | Face | Face |
| Pyrimidines | Cytidine: | [chemical structure] | [chemical structure] | [chemical structure] |
| | Uridine: | [chemical structure] | [chemical structure] | [chemical structure] |
| Purines | Adenosine: | [chemical structure] | [chemical structure] | [chemical structure] |
| | Guanosine: | [chemical structure] | [chemical structure] | [chemical structure] |

[0366] In some embodiments, B is a modified uracil. Exemplary modified uracils include those having Formula (b1)-(b5):

[chemical structure]

or a pharmaceutically acceptable salt or stereoisomer thereof,

[0367] wherein

[0368] [symbol] is a single or double bond;

[0369] each of T^{1′}, T^{1″}, T^{2′}, and T^{2″} is, independently, H, optionally substituted alkyl, optionally substituted alkoxy, or optionally substituted thioalkoxy, or the combination of T^{1′} and T^{1″} or the combination of T^{2′} and T^{2″} join together (e.g., as in T²) to form O (oxo), S (thio), or Se (seleno);

[0370] each of V¹ and V² is, independently, O, S, N(R^{Vb})ₙᵥ, or C(R^{Vb})ₙᵥ, wherein nv is an integer from 0 to 2 and each R^{Vb} is, independently, H, halo, optionally substituted amino acid, optionally substituted alkyl, optionally substituted haloalkyl, optionally substituted alkenyl, optionally substituted alkynyl, optionally substituted alkoxy, optionally substituted alkenyloxy, optionally substituted alkynyloxy, optionally substituted hydroxyalkyl, optionally substituted hydroxyalkenyl, optionally substituted hydroxyalkynyl, optionally substituted aminoalkyl (e.g., substituted with an N-protecting group, such as any described herein, e.g., trifluoroacetyl), optionally substituted aminoalkenyl, optionally substituted aminoalkynyl, optionally substituted acylaminoalkyl (e.g., substituted with an N-protecting group, such as any described herein, e.g., trifluoroacetyl), optionally substituted alkoxycarbonylalkyl, optionally substituted alkoxycarbonylalkenyl, optionally substituted alkoxycarbonylalkynyl, or optionally substituted alkynyloxy (e.g., optionally substituted with any substituent described herein, such as those selected from (1)-(21) for alkyl);

[0371] R¹⁰ is H, halo, optionally substituted amino acid, hydroxy, optionally substituted alkyl, optionally substituted alkenyl, optionally substituted alkynyl, optionally substituted aminoalkyl, optionally substituted hydroxyalkyl, optionally substituted hydroxyalkenyl, optionally substituted hydroxyalkynyl, optionally substituted aminoalkenyl, optionally substituted aminoalkynyl, optionally substituted alkoxy, optionally substituted alkoxycarbonylalkyl, optionally substituted alkoxycarbonylalkenyl, optionally substituted alkoxycarbonylalkynyl, optionally substituted alkoxycarbonylalkoxy, optionally substituted carboxyalkoxy, optionally substituted carboxyalkyl, or optionally substituted carbamoylalkyl;

[0372] R¹¹ is H or optionally substituted alkyl;

[0373] R^{12a} is H, optionally substituted alkyl, optionally substituted hydroxyalkyl, optionally substituted hydroxyalkenyl, optionally substituted hydroxyalkynyl, optionally substituted aminoalkyl, optionally substituted aminoalkenyl, or optionally substituted aminoalkynyl, optionally substituted carboxyalkyl (e.g., optionally substituted with hydroxy), optionally substituted carboxyalkoxy, optionally substituted carboxyaminoalkyl, or optionally substituted carbamoylalkyl; and

[0374] R^{12c} is H, halo, optionally substituted alkyl, optionally substituted alkoxy, optionally substituted thioalkoxy, optionally substituted amino, optionally substituted hydroxyalkyl, optionally substituted hydroxyalkenyl, optionally substituted hydroxyalkynyl, optionally substituted aminoalkyl, optionally substituted aminoalkenyl, or optionally substituted aminoalkynyl.

[0375] Other exemplary modified uracils include those having Formula (b6)-(b9):

[chemical structure]

(b9), or a pharmaceutically acceptable salt or stereoisomer thereof,

[0376] wherein

[0377] [symbol] is a single or double bond;

[0378] each of T^{1′}, T^{1″}, T^{2′}, and T^{2″} is, independently, H, optionally substituted alkyl, optionally substituted alkoxy, or optionally substituted thioalkoxy, or the combination of T^{1′} and T^{1″} join together (e.g., as in T¹) or the combination of T^{2′} and T^{2″} join together (e.g., as in T²) to form O (oxo), S (thio), or Se (seleno), or each T¹ and T² is, independently, O (oxo), S (thio), or Se (seleno);

[0379] each of W¹ and W² is, independently, N(R^{Wa})_{nw} or C(R^{Wa})_{nw}, wherein nw is an integer from 0 to 2 and each R^{Wa} is, independently, H, optionally substituted alkyl, or optionally substituted alkoxy;

[0380] each V³ is, independently, O, S, N(R^{Va})ₙᵥ, or C(R^{Va})ₙᵥ, wherein nv is an integer from 0 to 2 and each R^{Va} is, independently, H, halo, optionally substituted amino acid, optionally substituted alkyl, optionally substituted hydroxyalkyl, optionally substituted hydroxyalkenyl, optionally substituted hydroxyalkynyl, optionally substituted alkenyl, optionally substituted alkynyl, optionally substituted heterocyclyl, optionally substituted alkheterocyclyl, optionally substituted alkoxy, optionally substituted alkenyloxy, or optionally substituted alkynyloxy, optionally substituted aminoalkyl (e.g., substituted with an N-protecting group, such as any described herein, e.g., trifluoroacetyl, or sulfoalkyl), optionally substituted aminoalkenyl, optionally substituted aminoalkynyl, optionally substituted acylaminoalkyl (e.g., substituted with an N-protecting group, such as any described herein, e.g., trifluoroacetyl), optionally substituted alkoxycarbonylalkyl, optionally substituted alkoxycarbonylalkenyl, optionally substituted alkoxycarbonylalkynyl, optionally substituted alkoxycarbonylacyl, optionally substituted alkoxycarbonylalkoxy, optionally substituted carboxyalkyl (e.g., optionally substituted with hydroxy and/or an O-protecting group), optionally substituted carboxyalkoxy, optionally substituted carboxyaminoalkyl, or optionally substituted carbamoylalkyl (e.g., optionally substituted with any substituent described herein, such as those selected from (1)-(21) for alkyl), and wherein R^{Va} and R^{12c} taken together with the carbon atoms to which they are attached can form optionally substituted cycloalkyl, optionally substituted aryl, or optionally substituted heterocyclyl (e.g., a 5- or 6-membered ring);

[0381] R^{12a} is H, optionally substituted alkyl, optionally substituted hydroxyalkyl, optionally substituted hydroxyalkenyl, optionally substituted hydroxyalkynyl, optionally substituted aminoalkyl, optionally substituted aminoalkenyl, optionally substituted aminoalkynyl, optionally substituted carboxyalkyl (e.g., optionally substituted with hydroxy and/or an O-protecting group), optionally substituted carboxyalkoxy, optionally substituted carboxyaminoalkyl, optionally substituted carbamoylalkyl, or absent;

[0382] R^{12b} is H, optionally substituted alkyl, optionally substituted alkenyl, optionally substituted alkynyl, optionally substituted hydroxyalkyl, optionally substituted hydroxyalkenyl, optionally substituted hydroxyalkynyl, optionally substituted aminoalkyl, optionally substituted aminoalkenyl, optionally substituted aminoalkynyl, optionally substituted alkaryl, optionally substituted heterocyclyl, optionally substituted alkheterocyclyl, optionally substituted amino acid, optionally substituted alkoxycarbonylacyl, optionally substituted alkoxycarbonylalkoxy, optionally substituted alkoxycarbonylalkyl, optionally substituted alkoxycarbonylalkenyl, optionally substituted alkoxycarbonylalkynyl, optionally substituted alkoxycarbonylalkoxy, optionally substituted carboxyalkyl (e.g., optionally substituted with hydroxy and/or an O-protecting group), optionally substituted carboxyalkoxy, optionally substituted carboxyaminoalkyl, or optionally substituted carbamoylalkyl,

[0383] wherein the combination of R^{12b} and T^{1′} or the combination of R^{12b} and R^{12c} can join together to form optionally substituted heterocyclyl; and

[0384] R^{12c} is H, halo, optionally substituted alkyl, optionally substituted alkoxy, optionally substituted thioalkoxy, optionally substituted amino, optionally substituted aminoalkyl, optionally substituted aminoalkenyl, or optionally substituted aminoalkynyl.

[0385] Further exemplary modified uracils include those having Formula (b28)-(b31):

[chemical structure]

or a pharmaceutically acceptable salt or stereoisomer thereof,

[0386] wherein

[0387] each of T¹ and T² is, independently, O (oxo), S (thio), or Se (seleno);

[0388] each R^{Vb′} and R^{Vb″} is, independently, H, halo, optionally substituted amino acid, optionally substituted alkyl, optionally substituted haloalkyl, optionally substituted hydroxyalkyl, optionally substituted hydroxyalkenyl, optionally substituted hydroxyalkynyl, optionally substituted alkenyl, optionally substituted alkynyl, optionally substituted alkoxy, optionally substituted alkenyloxy, optionally substituted alkynyloxy, optionally substituted aminoalkyl (e.g., substituted with an N-protecting group, such as any described herein, e.g., trifluoroacetyl, or sulfoalkyl), optionally substituted aminoalkenyl, optionally substituted aminoalkynyl, optionally substituted acylaminoalkyl (e.g., substituted with an N-protecting group, such as any described herein, e.g., trifluoroacetyl), optionally substituted alkoxycarbonylalkyl, optionally substituted alkoxycarbonylalkenyl, optionally substituted alkoxycarbonylalkynyl, optionally substituted alkoxycarbonylacyl, optionally substituted alkoxycarbonylalkoxy, optionally substituted carboxyalkyl (e.g., optionally substituted with hydroxy and/or an O-protecting group), optionally substituted carboxyalkoxy, optionally substituted carboxyaminoalkyl, or optionally substituted carbamoylalkyl (e.g., optionally substituted with any substituent described herein, such as those selected from (1)-(21) for alkyl) (e.g., R^{Vb′} is optionally substituted alkyl, optionally substituted alkenyl, or optionally substituted aminoalkyl, e.g., substituted with an N-protecting group, such as any described herein, e.g., trifluoroacetyl, or sulfoalkyl);

[0389] R^{12a} is H, optionally substituted alkyl, optionally substituted carboxyaminoalkyl, optionally substituted aminoalkyl (e.g., e.g., substituted with an N-protecting group, such as any described herein, e.g., trifluoroacetyl, or sulfoalkyl), optionally substituted aminoalkenyl, or optionally substituted aminoalkynyl; and

[0390] R^{12b} is H, optionally substituted alkyl, optionally substituted alkenyl, optionally substituted alkynyl, optionally substituted hydroxyalkyl, optionally substituted hydroxyalkenyl, optionally substituted hydroxyalkynyl, optionally substituted aminoalkyl, optionally substituted aminoalkenyl, optionally substituted aminoalkynyl (e.g., e.g., substituted with an N-protecting group, such as any described herein, e.g., trifluoroacetyl, or sulfoalkyl),

[0391] optionally substituted alkoxycarbonylacyl, optionally substituted alkoxycarbonylalkoxy, optionally substituted alkoxycarbonylalkyl, optionally substituted alkoxycarbonylalkenyl, optionally substituted alkoxycarbonylalkynyl, optionally substituted alkoxycarbonylalkoxy, optionally substituted carboxyalkoxy, optionally substituted carboxyalkyl, or optionally substituted carbamoylalkyl.

[0392] In particular embodiments, T¹ is O (oxo), and T² is S (thio) or Se (seleno). In other embodiments, T¹ is S (thio), and T² is O (oxo) or Se (seleno). In some embodiments, R^{Vb′} is H, optionally substituted alkyl, or optionally substituted alkoxy.

[0393] In other embodiments, each R^{12a} and R^{12b} is, independently, H, optionally substituted alkyl, optionally substituted alkenyl, optionally substituted alkynyl, or optionally substituted hydroxyalkyl. In particular embodiments, R^{12a} is H. In other embodiments, both R^{12a} and R^{12b} are H.

[0394] In some embodiments, each R^{Vb′} of R^{12b} is, independently, optionally substituted aminoalkyl (e.g., substituted with an N-protecting group, such as any described herein, e.g., trifluoroacetyl, or sulfoalkyl), optionally substituted aminoalkenyl, optionally substituted aminoalkynyl, or optionally substituted acylaminoalkyl (e.g., substituted with an N-protecting group, such as any described herein, e.g., trifluoroacetyl). In some embodiments, the amino and/or alkyl of the optionally substituted aminoalkyl is substituted with one or more of optionally substituted alkyl, optionally substituted alkenyl, optionally substituted sulfoalkyl, optionally substituted carboxy (e.g., substituted with an O-protecting group), optionally substituted hydroxy (e.g., substituted with an O-protecting group), optionally substituted carboxyalkyl (e.g., substituted with an O-protecting group), optionally substituted alkoxycarbonylalkyl (e.g., substituted with an O-protecting group), or N-protecting group. In some embodiments, optionally substituted aminoalkyl is substituted with an optionally substituted sulfoalkyl or optionally substituted alkenyl. In particular embodiments, R^{12a} and R^{Vb″} are both H. In particular embodiments, T¹ is O (oxo), and T² is S (thio) or Se (seleno).

[0395] In some embodiments, R^{Vb′} is optionally substituted alkoxycarbonylalkyl or optionally substituted carbamoylalkyl.

[0396] In particular embodiments, the optional substituent for R^{12a}, R^{12b}, R^{12c}, or R^{Va} is a polyethylene glycol group (e.g., —(CH₂)ₛ₂(OCH₂CH₂)ₛ₁(CH₂)ₛ₃OR′, wherein s1 is an integer from 1 to 10 (e.g., from 1 to 6 or from 1 to 4), each of s2 and s3, independently, is an integer from 0 to 10 (e.g., from 0 to 4, from 0 to 6, from 1 to 4, from 1 to 6, or from 1 to 10), and R′ is H or C₁₋₂₀ alkyl); or an amino-polyethylene glycol group (e.g., —NR^{N1}(CH₂)ₛ₂(CH₂CH₂O)ₛ₁(CH₂)ₛ₃NR^{N1}, wherein s1 is an integer from 1 to 10 (e.g., from 1 to 6 or from 1 to 4), each of s2 and s3, independently, is an integer from 0 to 10 (e.g., from 0 to 4, from 0 to 6, from 1 to 4, from 1 to 6, or from 1 to 10), and each R^{N1} is, independently, hydrogen or optionally substituted C₁₋₆ alkyl).

[0397] In some embodiments, B is a modified cytosine. Exemplary modified cytosines include compounds of Formula (b10)-(b14):

[chemical structure]

or a pharmaceutically acceptable salt or stereoisomer thereof,

[0398] wherein

[0399] each of T^{3′} and T^{3″} is, independently, H, optionally substituted alkyl, optionally substituted alkoxy, or optionally substituted thioalkoxy, or the combination of T^{3′} and T^{3″} join together (e.g., as in T³) to form O (oxo), S (thio), or Se (seleno);

[0400] each V⁴ is, independently, O, S, N(R^{Vc})ₙᵥ, or C(R^{Vc})ₙᵥ, wherein nv is an integer from 0 to 2 and each R^{Vc} is, independently, H, halo, optionally substituted amino acid, optionally substituted alkyl, optionally substituted alkenyl, optionally substituted alkynyl, optionally substituted alkoxy, optionally substituted alkenyloxy, optionally substituted heterocyclyl, optionally substituted alkheterocyclyl, or optionally substituted alkynyloxy (e.g., optionally substituted with any substituent described herein, such as those selected from (1)-(21) for alkyl), wherein the combination of R^{13b} and R^{Vc} can be taken together to form optionally substituted heterocyclyl;

[0401] each V⁵ is, independently, N(R^{Vd})ₙᵥ, or C(R^{Vd})ₙᵥ, wherein nv is an integer from 0 to 2 and each R^{Vd} is, independently, H, halo, optionally substituted amino acid, optionally substituted alkyl, optionally substituted alkenyl, optionally substituted alkynyl, optionally substituted alkoxy, optionally substituted alkenyloxy, optionally substituted heterocyclyl, optionally substituted alkheterocyclyl, or optionally substituted alkynyloxy (e.g., optionally substituted with any substituent described herein, such as those selected from (1)-(21) for alkyl) (e.g., V⁵ is —CH or N);

[0402] each of R^{13a} and R^{13b} is, independently, H, optionally substituted acyl, optionally substituted acyloxyalkyl, optionally substituted alkyl, or optionally substituted alkoxy, wherein the combination of R^{13b} and R¹⁴ can be taken together to form optionally substituted heterocyclyl;

[0403] each R¹⁴ is, independently, H, halo, hydroxy, thiol, optionally substituted acyl, optionally substituted amino acid, optionally substituted alkyl, optionally substituted haloalkyl, optionally substituted alkenyl, optionally substituted alkynyl, optionally substituted hydroxyalkyl (e.g., substituted with an O-protecting group), optionally substituted hydroxyalkenyl, optionally substituted hydroxyalkynyl, optionally substituted alkoxy, optionally substituted alkenyloxy, optionally substituted alkynyloxy, optionally substituted aminoalkoxy, optionally substituted alkoxyalkoxy, optionally substituted acyloxyalkyl, optionally substituted amino (e.g., —NHR, wherein R is H, alkyl, aryl, or phosphoryl), azido, optionally substituted aryl, optionally substituted heterocyclyl, optionally substituted alkheterocyclyl, optionally substituted aminoalkyl, optionally substituted aminoalkenyl, or optionally substituted aminoalkyl; and

[0404] each of R¹⁵ and R¹⁶ is, independently, H, optionally substituted alkyl, optionally substituted alkenyl, or optionally substituted alkynyl.

[0405] Further exemplary modified cytosines include those having Formula (b32)-(b35):

[chemical structure]

or a pharmaceutically acceptable salt or stereoisomer thereof,

[0406] wherein

[0407] each of T¹ and T³ is, independently, O (oxo), S (thio), or Se (seleno);

[0408] each of R^{13a} and R^{13b} is, independently, H, optionally substituted acyl, optionally substituted acyloxyalkyl, optionally substituted alkyl, or optionally substituted alkoxy, wherein the combination of R^{13b} and R¹⁴ can be taken together to form optionally substituted heterocyclyl;

[0409] each R¹⁴ is, independently, H, halo, hydroxy, thiol, optionally substituted acyl, optionally substituted amino acid, optionally substituted alkyl, optionally substituted haloalkyl, optionally substituted alkenyl, optionally substituted alkynyl, optionally substituted hydroxyalkyl (e.g., substituted with an O-protecting group), optionally substituted hydroxyalkenyl, optionally substituted hydroxyalkynyl, optionally substituted alkoxy, optionally substituted alkenyloxy, optionally substituted alkynyloxy, optionally substituted aminoalkoxy, optionally substituted alkoxyalkoxy, optionally substituted acyloxyalkyl, optionally substituted amino (e.g., —NHR, wherein R is H, alkyl, aryl, or phosphoryl), azido, optionally substituted aryl, optionally substituted heterocyclyl, optionally substituted alkheterocyclyl, optionally substituted aminoalkyl (e.g., hydroxyalkyl, alkyl, alkenyl, or alkynyl), optionally substituted aminoalkenyl, or optionally substituted aminoalkynyl; and

[0410] each of R¹⁵ and R¹⁶ is, independently, H, optionally substituted alkyl, optionally substituted alkenyl, or optionally substituted alkynyl (e.g., R¹⁵ is H, and R¹⁶ is H or optionally substituted alkyl).

[0411] In some embodiments, R¹⁵ is H, and R¹⁶ is H or optionally substituted alkyl. In particular embodiments, R¹⁴ is H, acyl, or hydroxyalkyl. In some embodiments, R¹⁴ is halo. In some embodiments, both R¹⁴ and R¹⁵ are H. In some embodiments, both R¹⁵ and R¹⁶ are H. In some embodiments, each of R¹⁴ and R¹⁵ and R¹⁶ is H. In further embodiments, each of R^{13a} and R^{13b} is independently, H or optionally substituted alkyl.

[0412] Further non-limiting examples of modified cytosines include compounds of Formula (b36):

[chemical structure]

or a pharmaceutically acceptable salt or stereoisomer thereof,

[0413] wherein

[0414] each R^{13b} is, independently, H, optionally substituted acyl, optionally substituted acyloxyalkyl, optionally substituted alkyl, or optionally substituted alkoxy, wherein the combination of R^{13b} and R^{14b} can be taken together to form optionally substituted heterocyclyl;

[0415] each R^{14a} and R^{14b} is, independently, H, halo, hydroxy, thiol, optionally substituted acyl, optionally substituted amino acid, optionally substituted alkyl, optionally substituted haloalkyl, optionally substituted alkenyl, optionally substituted alkynyl, optionally substituted hydroxyalkyl (e.g., substituted with an O-protecting group), optionally substituted hydroxyalkenyl, optionally substituted alkoxy, optionally substituted alkenyloxy, optionally substituted alkynyloxy, optionally substituted aminoalkoxy, optionally substituted alkoxyalkoxy, optionally substituted acyloxyalkyl, optionally substituted amino (e.g., —NHR, wherein R is H, alkyl, aryl, phosphoryl, optionally substituted aminoalkyl, or optionally substituted carboxyaminoalkyl), azido, optionally substituted aryl, optionally substituted heterocyclyl, optionally substituted alkheterocyclyl, optionally substituted aminoalkyl, optionally substituted aminoalkenyl, or optionally substituted aminoalkynyl; and

[0416] each of R¹⁵ is, independently, H, optionally substituted alkyl, optionally substituted alkenyl, or optionally substituted alkynyl.

[0417] In particular embodiments, R^{14b} is an optionally substituted amino acid (e.g., optionally substituted lysine). In some embodiments, R^{14a} is H.

[0418] In some embodiments, B is a modified guanine Exemplary modified guanines include compounds of Formula (b15)-(b17):

[chemical structure]

or a pharmaceutically acceptable salt or stereoisomer thereof,

[0419] wherein

[0420] each of T^{4′}, T^{4″}, T^{5′}, T^{5″}, T^{6′}, and T^{6″} is, independently, H, optionally substituted alkyl, or optionally substituted alkoxy, and wherein the combination of T^{4′} and T^{4″} (e.g., as in T⁴) or the combination of T^{5′} and T^{5″} (e.g., as in T⁵) or the combination of T^{6′} and T^{6″} (e.g., as in T⁶) join together form O (oxo), S (thio), or Se (seleno);

[0421] each of V⁵ and V⁶ is, independently, O, S, N(R^{Vd})ₙᵥ, or C(R^{Vd})ₙᵥ, wherein nv is an integer from 0 to 2 and each R^{Vd} is, independently, H, halo, thiol, optionally substituted amino acid, cyano, amidine, optionally substituted aminoalkyl, optionally substituted aminoalkenyl, optionally substituted aminoalkynyl, optionally substituted alkyl, optionally substituted alkenyl, optionally substituted alkynyl, optionally substituted alkoxy, optionally substituted alkenyloxy, or optionally substituted alkynyloxy (e.g., optionally substituted with any substituent described herein, such as those selected from (1)-(21) for alkyl), optionally substituted thioalkoxy, or optionally substituted amino; and

[0422] each of R¹⁷, R¹⁸, R^{19a}, R^{19b}, R²¹, R²², R²³, and R²⁴ is, independently, H, halo, thiol, optionally substituted alkyl, optionally substituted alkenyl, optionally substituted alkynyl, optionally substituted thioalkoxy, optionally substituted amino, or optionally substituted amino acid.

[0423] Exemplary modified guanosines include compounds of Formula (b37)-(b40):

[chemical structure]

or a pharmaceutically acceptable salt or stereoisomer thereof,

[0424] wherein

[0425] each of T^{4′} is, independently, H, optionally substituted alkyl, or optionally substituted alkoxy, and each T⁴ is, independently, O (oxo), S (thio), or Se (seleno);

[0426] each of R¹⁸, R^{19a}, R^{19b}, and R²¹ is, independently, H, halo, thiol, optionally substituted alkyl, optionally substituted alkenyl, optionally substituted alkynyl, optionally substituted thioalkoxy, optionally substituted amino, or optionally substituted amino acid.

[0427] In some embodiments, R¹⁸ is H or optionally substituted alkyl. In further embodiments, T⁴ is oxo. In some embodiments, each of R^{19a} and R^{19b} is, independently, H or optionally substituted alkyl.

[0428] In some embodiments, B is a modified adenine. Exemplary modified adenines include compounds of Formula (b18)-(b20):

[chemical structure]

or a pharmaceutically acceptable salt or stereoisomer thereof,

[0429] wherein

[0430] each V⁷ is, independently, O, S, N(R^{Ve})ₙᵥ, or C(R^{Ve})ₙᵥ, wherein nv is an integer from 0 to 2 and each R^{Ve} is, independently, H, halo, optionally substituted amino acid, optionally substituted alkyl, optionally substituted alkenyl, optionally substituted alkynyl, optionally substituted alkoxy, optionally substituted alkenyloxy, or optionally substituted alkynyloxy (e.g., optionally substituted with any substituent described herein, such as those selected from (1)-(21) for alkyl);

[0431] each R²⁵ is, independently, H, halo, thiol, optionally substituted alkyl, optionally substituted alkenyl, optionally substituted alkynyl, optionally substituted thioalkoxy, or optionally substituted amino;

[0432] each of R^{26a} and R^{26b} is, independently, H, optionally substituted acyl, optionally substituted amino acid, optionally substituted carbamoylalkyl, optionally substituted alkyl, optionally substituted alkenyl, optionally substituted alkynyl, optionally substituted hydroxyalkyl, optionally substituted hydroxyalkenyl, optionally substituted hydroxyalkynyl, optionally substituted alkoxy, or polyethylene glycol group (e.g., —(CH₂)ₛ₂(OCH₂CH₂)ₛ₁(CH₂)ₛ₃OR′, wherein s1 is an integer from 1 to 10 (e.g., from 1 to 6 or from 1 to 4), each of s2 and s3, independently, is an integer from 0 to 10 (e.g., from 0 to 4, from 0 to 6, from 1 to 4, from 1 to 6, or from 1 to 10), and R′ is H or C₁₋₂₀ alkyl); or an amino-polyethylene glycol group (e.g., —NR^{N1}(CH₂)ₛ₂(CH₂CH₂O)ₛ₁(CH₂)ₛ₃NR^{N1}, wherein s1 is an integer from 1 to 10 (e.g., from 1 to 6 or from 1 to 4), each of s2 and s3, independently, is an integer from 0 to 10 (e.g., from 0 to 4, from 0 to 6, from 1 to 4, from 1 to 6, or from 1 to 10), and each R^{N1} is, independently, hydrogen or optionally substituted C₁₋₆ alkyl);

[0433] each R²⁷ is, independently, H, optionally substituted alkyl, optionally substituted alkenyl, optionally substituted alkynyl, optionally substituted alkoxy, optionally substituted thioalkoxy or optionally substituted amino;

[0434] each R²⁸ is, independently, H, optionally substituted alkyl, optionally substituted alkenyl, or optionally substituted alkynyl; and

[0435] each R²⁹ is, independently, H, optionally substituted acyl, optionally substituted amino acid, optionally substituted carbamoylalkyl, optionally substituted alkyl, optionally substituted alkenyl, optionally substituted alkynyl, optionally substituted hydroxyalkyl, optionally substituted hydroxyalkenyl, optionally substituted alkoxy, or optionally substituted amino.

[0436] Exemplary modified adenines include compounds of Formula (b41)-(b43):

[chemical structure]

or a pharmaceutically acceptable salt or stereoisomer thereof,

[0437] wherein

[0438] each R²⁵ is, independently, H, halo, thiol, optionally substituted alkyl, optionally substituted alkenyl, optionally substituted alkynyl, optionally substituted thioalkoxy, or optionally substituted amino;

[0439] each of R^{26a} and R^{26b} is, independently, H, optionally substituted acyl, optionally substituted amino acid, optionally substituted carbamoylalkyl, optionally substituted alkyl, optionally substituted alkenyl, optionally substituted alkynyl, optionally substituted hydroxyalkyl, optionally substituted hydroxyalkenyl, optionally substituted hydroxyalkynyl, optionally substituted alkoxy, or polyethylene glycol group (e.g., —(CH₂)ₛ₂(OCH₂CH₂)ₛ₁(CH₂)ₛ₃OR′, wherein s1 is an integer from 1 to 10 (e.g., from 1 to 6 or from 1 to 4), each of s2 and s3, independently, is an integer from 0 to 10 (e.g., from 0 to 4, from 0 to 6, from 1 to 4, from 1 to 6, or from 1 to 10), and R′ is H or C₁₋₂₀ alkyl); or an amino-polyethylene glycol group (e.g., —NR^{N1}(CH₂)ₛ₂(CH₂CH₂O)ₛ₁(CH₂)ₛ₃NR^{N1}, wherein s1 is an integer from 1 to 10 (e.g., from 1 to 6 or from 1 to 4), each of s2 and s3, independently, is an integer from 0 to 10 (e.g., from 0 to 4, from 0 to 6, from 1 to 4, from 1 to 6, or from 1 to 10), and each R^{N1} is, independently, hydrogen or optionally substituted C₁₋₆ alkyl); and

[0440] each R²⁷ is, independently, H, optionally substituted alkyl, optionally substituted alkenyl, optionally substituted alkynyl, optionally substituted alkoxy, optionally substituted thioalkoxy, or optionally substituted amino.

[0441] In some embodiments, R^{26a} is H, and R^{26b} is optionally substituted alkyl. In some embodiments, each of R^{26a} and R^{26b} is, independently, optionally substituted alkyl. In particular embodiments, R²⁷ is optionally substituted alkyl, optionally substituted alkoxy, or optionally substituted thioalkoxy. In other embodiments, R²⁵ is optionally substituted alkyl, optionally substituted alkoxy, or optionally substituted thioalkoxy.

[0442] In particular embodiments, the optional substituent for R^{26a}, R^{26b}, or R²⁹ is a polyethylene glycol group (e.g., —(CH₂)ₛ₂(OCH₂CH₂)ₛ₁(CH₂)ₛ₃OR′, wherein s1 is an integer from 1 to 10 (e.g., from 1 to 6 or from 1 to 4), each of s2 and s3, independently, is an integer from 0 to 10 (e.g., from 0 to 4, from 0 to 6, from 1 to 4, from 1 to 6, or from 1 to 10), and R′ is H or C₁₋₂₀ alkyl); or an amino-polyethylene glycol group (e.g., —NR^{N1}(CH₂)ₛ₂(CH₂CH₂O)ₛ₁(CH₂)ₛ₃NR^{N1}, wherein s1 is an integer from 1 to 10 (e.g., from 1 to 6 or from 1 to 4), each of s2 and s3, independently, is an integer from 0 to 10 (e.g., from 0 to 4, from 0 to 6, from 1 to 4, from 1 to 6, or from 1 to 10), and each R^{N1} is, independently, hydrogen or optionally substituted C₁₋₆ alkyl).

In some embodiments, B may have Formula (b21):

[chemical structure]

wherein X¹² is, independently, O, S, optionally substituted alkylene (e.g., methylene), or optionally substituted heteroalkylene, xa is an integer from 0 to 3, and R^{12a} and T² are as described herein.

[0443] In some embodiments, B may have Formula (b22):

[chemical structure]

wherein R^{10′} is, independently, optionally substituted alkyl, optionally substituted alkenyl, optionally substituted alkynyl, optionally substituted aryl, optionally substituted heterocyclyl, optionally substituted aminoalkyl, optionally substituted aminoalkenyl, optionally substituted aminoalkynyl, optionally substituted alkoxy, optionally substituted alkoxycarbonylalkyl, optionally substituted alkoxycarbonylalkenyl, optionally substituted alkoxycarbonylalkynyl, optionally substituted alkoxycarbonylalkoxy, optionally substituted carboxyalkoxy, optionally substituted carboxyalkyl, or optionally substituted carbamoylalkyl, and R¹¹, R^{12a}, T¹, and T² are as described herein.

[0444] In some embodiments, B may have Formula (b23):

[chemical structure]

wherein R¹⁰ is optionally substituted heterocyclyl (e.g., optionally substituted furyl, optionally substituted thienyl, or optionally substituted pyrrolyl), optionally substituted aryl (e.g., optionally substituted phenyl or optionally substituted naphthyl), or any substituent described herein (e.g., for) R¹⁰; and wherein R¹¹ (e.g., H or any substituent described herein), R^{12a} (e.g., H or any substituent described herein), T¹ (e.g., oxo or any substituent described herein), and T² (e.g., oxo or any substituent described herein) are as described herein.
In some embodiments, B may have Formula (b24):

[chemical structure]

wherein R^{14′} is, independently, optionally substituted alkyl, optionally substituted alkenyl, optionally substituted alkynyl, optionally substituted aryl, optionally substituted heterocyclyl, optionally substituted alkaryl, optionally substituted alkheterocyclyl, optionally substituted aminoalkyl, optionally substituted aminoalkenyl, optionally substituted aminoalkynyl, optionally substituted alkoxy, optionally substituted alkoxycarbonylalkenyl, optionally substituted alkoxycarbonylalkynyl, optionally substituted alkoxycarbonylalkyl, optionally substituted alkoxycarbonylalkoxy, optionally substituted carboxyalkoxy, optionally substituted carboxyalkyl, or optionally substituted carbamoylalkyl, and R^{13a}, R^{13b}, R¹⁵, and T³ are as described herein.
In some embodiments, B may have Formula (b25):

[chemical structure]

wherein R^{14′} is optionally substituted heterocyclyl (e.g., optionally substituted furyl, optionally substituted thienyl, or optionally substituted pyrrolyl), optionally substituted aryl (e.g., optionally substituted phenyl or optionally substituted naphthyl), or any substituent described herein (e.g., for R¹⁴ or R^{14′}); and wherein R^{13a} (e.g., H or any substituent described herein), R^{13b} (e.g., H or any substituent described herein), R¹⁵ (e.g., H or any substituent described herein), and T³ (e.g., oxo or any substituent described herein) are as described herein.
In some embodiments, B is a nucleobase selected from the group consisting of cytosine, guanine, adenine, and uracil. In some embodiments, B may be:

[chemical structure]

[0445] In some embodiments, the modified nucleobase is a modified uracil. Exemplary nucleobases and nucleosides having a modified uracil include pseudouridine (ψ), pyridin-4-one ribonucleoside, 5-aza-uridine, 6-aza-uridine, 2-thio-5-aza-uridine, 2-thio-uridine (s²U), 4-thio-uridine (s⁴U), 4-thio-pseudouridine, 2-thio-pseudouridine, 5-hydroxy-uridine (ho⁵U), 5-aminoallyl-uridine, 5-halo-uridine (e.g., 5-iodo-uridine or 5-bromo-uridine), 3-methyl-uridine (m³U), 5-methoxy-uridine (mo⁵U), uridine 5-oxyacetic acid (cmo⁵U), uridine 5-oxyacetic acid methyl ester (mcmo⁵U), 5-carboxymethyl-uridine (cm⁵U), 1-carboxymethyl-pseudouridine, 5-carboxyhydroxymethyl-uridine (chm⁵U), 5-carboxyhydroxymethyl-uridine methyl ester (mchm⁵U), 5-methoxycarbonylmethyl-uridine (mcm⁵U), 5-methoxycarbonylmethyl-2-thio-uridine (mcm⁵s²U), 5-aminomethyl-2-thio-uridine (nm⁵s²U), 5-methylaminomethyl-uridine (mnm⁵U), 5-methylaminomethyl-2-thio-uridine (mnm⁵s²U), 5-methylaminomethyl-2-seleno-uridine (mnm⁵se²U), 5-carbamoylmethyl-uridine (ncm⁵U), 5-carboxymethylaminomethyl-uridine (cmnm⁵U), 5-carboxymethylaminomethyl-2-thio-uridine (cmnm⁵s²U), 5-propynyl-uridine, 1-propynyl-pseudouridine, 5-taurinomethyl-uridine (τm⁵U), 1-taurinomethyl-pseudouridine, 5-taurinomethyl-2-thio-uridine(τm⁵s²U), 1-taurinomethyl-4-thio-pseudouridine, 5-methyl-uridine (m⁵U, i.e., having the nucleobase deoxythymine), 1-methyl-pseudouridine (m¹ψ), 5-methyl-2-thio-uridine (m⁵s²U), 1-methyl-4-thio-pseudouridine (m¹s⁴ψ)^{,} 4-thio-1-methyl-pseudouridine, 3-methyl-pseudouridine (m³ψ), 2-thio-1-methyl-pseudouridine, 1-methyl-1-deaza-pseudouridine, 2-thio-1-methyl-1-deaza-pseudouridine, dihydrouridine (D), dihydropseudouridine, 5,6-dihydrouridine, 5-methyl-dihydrouridine (m⁵D), 2-thio-dihydrouridine, 2-thio-dihydropseudouridine, 2-methoxy-uridine, 2-methoxy-4-thio-uridine, 4-methoxy-pseudouridine, 4-methoxy-2-thio-pseudouridine, N1-methyl-pseudouridine, 3-(3-amino-3-carboxypropyl)uridine (acp³U), 1-methyl-3-(3-amino-3-carboxypropyl)pseudouridine (acp³ ψ), 5-(isopentenylaminomethyl)uridine (inm⁵U), 5-(isopentenylaminomethyl)-2-thio-uridine (inm⁵s²U), α-thio-uridine, 2′-O-methyl-uridine (Um), 5,2′-O-dimethyl-uridine (m⁵Um), 2′-O-methyl-pseudouridine (ψm), 2-thio-2′-O-methyl-uridine (s²Um), 5-methoxycarbonylmethyl-2′-O-methyl-uridine (mcm⁵Um), 5-carbamoylmethyl-2′-O-methyl-uridine (ncm⁵Um), 5-carboxymethylaminomethyl-2′-O-methyl-uridine (cmnm⁵Um), 3,2′-O-dimethyl-uridine (m³Um), 5-(isopentenylaminomethyl)-2′-O-methyl-uridine (inm⁵Um), 1-thio-uridine, deoxythymidine, 2′-F-ara-uridine, 2′-F-uridine, 2′-OH-ara-uridine, 5-(2-carbomethoxyvinyl) uridine, and 5-[3-(1-E-propenylamino)uridine.

[0446] In some embodiments, the modified nucleobase is a modified cytosine. Exemplary nucleobases and nucleosides having a modified cytosine include 5-aza-cytidine, 6-aza-cytidine, pseudoisocytidine, 3-methyl-cytidine (m³C), N4-acetyl-cytidine (ac⁴C), 5-formyl-cytidine (f⁵C), N4-methyl-cytidine (m⁴C), 5-methyl-cytidine (m⁵C), 5-halo-cytidine (e.g., 5-iodo-cytidine), 5-hydroxymethyl-cytidine (hm⁵C), 1-methyl-pseudoisocytidine, pyrrolo-cytidine, pyrrolo-pseudoisocytidine, 2-thio-cytidine (s²C), 2-thio-5-methyl-cytidine, 4-thio-pseudoisocytidine, 4-thio-1-methyl-pseudoisocytidine, 4-thio-1-methyl-1-deaza-pseudoisocytidine, 1-methyl-1-deaza-pseudoisocytidine, zebularine, 5-aza-zebularine, 5-methyl-zebularine, 5-aza-2-thio-zebularine, 2-thio-zebularine, 2-methoxy-cytidine, 2-methoxy-5-methyl-cytidine, 4-methoxy-pseudoisocytidine, 4-methoxy-1-methyl-pseudoisocytidine, lysidine (k₂C), α-thio-cytidine, 2′-O-methyl-cytidine (Cm), 5,2′-O-dimethyl-cytidine (m⁵Cm), N4-acetyl-2′-O-methyl-cytidine (ac⁴Cm), N4,2′-O-dimethyl-cytidine (m⁴Cm), 5-formyl-2′-O-methyl-cytidine (f⁵Cm), N4,N4,2′-O-trimethyl-cytidine (m⁴₂ Cm), 1-thio-cytidine, 2′-F-ara-cytidine, 2′-F-cytidine, and 2′-OH-ara-cytidine.

[0447] In some embodiments, the modified nucleobase is a modified adenine. Exemplary nucleobases and nucleosides having a modified adenine include 2-amino-purine, 2,6-diaminopurine, 2-amino-6-halo-purine (e.g., 2-amino-6-chloro-purine), 6-halo-purine (e.g., 6-chloro-purine), 2-amino-6-methyl-purine, 8-azido-adenosine, 7-deaza-adenine, 7-deaza-8-aza-adenine, 7-deaza-2-amino-purine, 7-deaza-8-aza-2-amino-purine, 7-deaza-2,6-diaminopurine, 7-deaza-8-aza-2,6-diaminopurine, 1-methyl-adenosine (m¹A), 2-methyl-adenine (m²A), N6-methyl-adenosine (m⁶A), 2-methylthio-N6-methyl-adenosine (ms² m⁶A), N6-isopentenyl-adenosine (i⁶A), 2-methylthio-N6-isopentenyl-adenosine (ms²i⁶A), N6-(cis-hydroxyisopentenyl)adenosine (io⁶A), 2-methylthio-N6-(cis-hydroxyisopentenyl)adenosine (ms²io⁶A), N6-glycinylcarbamoyl-adenosine (g⁶A), N6-threonylcarbamoyl-adenosine (t⁶A), N6-methyl-N6-threonylcarbamoyl-adenosine (m⁶t⁶A), 2-methylthio-N6-threonylcarbamoyl-adenosine (ms²g⁶A), N6,N6-dimethyl-adenosine (m⁶₂A), N6-hydroxynorvalylcarbamoyl-adenosine (hn⁶A), 2-methylthio-N6-hydroxynorvalylcarbamoyl-adenosine (ms²hn⁶A), N6-acetyl-adenosine (ac⁶A), 7-methyl-adenine, 2-methylthio-adenine, 2-methoxy-adenine, α-thio-adenosine, 2′-O-methyl-adenosine (Am), N6,2′-O-dimethyl-adenosine (m⁶Am), N6,N6,2′-O-trimethyl-adenosine (m⁶₂ Am), 1,2′-O-dimethyl-adenosine (m¹Am), 2′-O-ribosyladenosine (phosphate) (Ar(p)), 2-amino-N6-methyl-purine, 1-thio-adenosine, 8-azido-adenosine, 2′-F-ara-adenosine, 2′-F-adenosine, 2′-OH-ara-adenosine, and N6-(19-amino-pentaoxanonadecyl)-adenosine.

[0448] In some embodiments, the modified nucleobase is a modified guanine Exemplary nucleobases and nucleosides having a modified guanine include inosine (I), 1-methyl-inosine (m¹I), wyosine (imG), methylwyosine (mimG), 4-demethyl-wyosine (imG-14), isowyosine (imG2), wybutosine (yW), peroxywybutosine (o₂yW), hydroxywybutosine (OHyW), undermodified hydroxywybutosine (OHyW*), 7-deaza-guanosine, queuosine (Q), epoxyqueuosine (oQ), galactosyl-queuosine (galQ), mannosyl-queuosine (manQ), 7-cyano-7-deaza-guanosine (preQ₀), 7-aminomethyl-7-deaza-guanosine (preQ₁), archaeosine (0,7-deaza-8-aza-guanosine, 6-thio-guanosine, 6-thio-7-deaza-guanosine, 6-thio-7-deaza-8-aza-guanosine, 7-methyl-guanosine (m⁷G), 6-thio-7-methyl-guanosine, 7-methyl-inosine, 6-methoxy-guanosine, 1-methyl-guanosine (m¹G), N2-methyl-guanosine (m²G), N2,N2-dimethyl-guanosine (m²₂G), N2,7-dimethyl-guanosine (m^{2,7}G), N2,N2,7-dimethyl-guanosine (m^{2,2,7}G), 8-oxo-guanosine, 7-methyl-8-oxo-guanosine, 1-methyl-6-thio-guanosine, N2-methyl-6-thio-guanosine, N2,N2-dimethyl-6-thio-guanosine, α-thio-guanosine, 2′-O-methyl-guanosine (Gm), N2-methyl-2′-O-methyl-guanosine (m²Gm), N2,N2-dimethyl-2′-O-methyl-guanosine (m²₂Gm), 1-methyl-2′-O-methyl-guanosine (m¹Gm), N2,7-dimethyl-2′-O-methyl-guanosine (m^{2,7}Gm), 2′-O-methyl-inosine (Im), 1,2′-O-dimethyl-inosine (m¹Im), and 2′-O-ribosylguanosine (phosphate) (Gr(p)).

[0449] The nucleobase of the nucleotide can be independently selected from a purine, a pyrimidine, a purine or pyrimidine analog. For example, the nucleobase can each be independently selected from adenine, cytosine, guanine, uracil, or hypoxanthine. In another embodiment, the nucleobase can also include, for example, naturally-occurring and synthetic derivatives of a base, including pyrazolo[3,4-d]pyrimidines, 5-methylcytosine (5-me-C), 5-hydroxymethyl cytosine, xanthine, hypoxanthine, 2-aminoadenine, 6-methyl and other alkyl derivatives of adenine and guanine, 2-propyl and other alkyl derivatives of adenine and guanine, 2-thiouracil, 2-thiothymine and 2-thiocytosine, 5-propynyl uracil and cytosine, 6-azo uracil, cytosine and thymine, 5-uracil (pseudouracil), 4-thiouracil, 8-halo (e.g., 8-bromo), 8-amino, 8-thiol, 8-thioalkyl, 8-hydroxyl and other 8-substituted adenines and guanines, 5-halo particularly 5-bromo, 5-trifluoromethyl and other 5-substituted uracils and cytosines, 7-methylguanine and 7-Methyladenine, 8-azaguanine and 8-azaadenine, deazaguanine, 7-deazaguanine, 3-Deazaguanine, deazaadenine, 7-deazaadenine, 3-deazaadenine, pyrazolo[3,4-D]pyrimidine, imidazo[1,5-a]1,3,5 triazinones, 9-deazapurines, imidazo[4,5-d]pyrazines, Thiazolo[4,5-d]pyrimidines, pyrazin-2-ones, 1,2,4-triazine, pyridazine; and 1,3,5 triazine. When the nucleotides are depicted using the shorthand a, g, c, t or u, each letter refers To the representative base and/or derivatives thereof, e.g., A includes adenine or adenine analogs, e.g., 7-deaza adenine).

### Modifications on the Internucleoside Linkage

[0450] The modified nucleotides, which may be incorporated into a cell phenotype altering polynucleotide, primary construct, or mmRNA molecule, can be modified on the internucleoside linkage (e.g., phosphate backbone). Herein, in the context of the polynucleotide backbone, the phrases “phosphate” and “phosphodiester” are used interchangeably. Backbone phosphate groups can be modified by replacing one or more of the oxygen atoms with a different substituent. Further, the modified nucleosides and nucleotides can include the wholesale replacement of an unmodified phosphate moiety with another internucleoside linkage as described herein. Examples of modified phosphate groups include, but are not limited to, phosphorothioate, phosphoroselenates, boranophosphates, boranophosphate esters, hydrogen phosphonates, phosphoramidates, phosphorodiamidates, alkyl or aryl phosphonates, and phosphotriesters.

[0451] Phosphorodithioates have both non-linking oxygens replaced by sulfur. The phosphate linker can also be modified by the replacement of a linking oxygen with nitrogen (bridged phosphoramidates), sulfur (bridged phosphorothioates), and carbon (bridged methylene-phosphonates).

[0452] The α-thio substituted phosphate moiety is provided to confer stability to RNA and DNA polymers through the unnatural phosphorothioate backbone linkages. Phosphorothioate DNA and RNA have increased nuclease resistance and subsequently a longer half-life in a cellular environment. Phosphorothioate linked cell phenotype altering polynucleotides, primary constructs, or mmRNA molecules are expected to also reduce the innate immune response through weaker binding/activation of cellular innate immune molecules.

[0453] In specific embodiments, a modified nucleoside includes an alpha-thio-nucleoside (e.g., 5′-O-(1-thiophosphate)-adenosine, 5′-O-(1-thiophosphate)-cytidine (α-thio-cytidine), 5′-O-(1-thiophosphate)-guanosine, 5′-O-(1-thiophosphate)-uridine, or 5′-O-(1-thiophosphate)-pseudouridine).

[0454] Other internucleoside linkages that may be employed according to the present invention, including internucleoside linkages which do not contain a phosphorous atom, are described herein below.

### Combinations of Modified Sugars, Nucleobases, and Internucleoside Linkages

[0455] The cell phenotype altering polynucleotides, primary constructs, and mmRNA of the invention can include a combination of modifications to the sugar, the nucleobase, and/or the internucleoside linkage. These combinations can include any one or more modifications described herein. For examples, any of the nucleotides described herein in Formulas (Ia), (Ia-1)-(Ia-3), (Ib)-(If), (IIa)-(IIp), (IIb-1), (IIb-2), (IIc-1)-(IIc-2), (IIn-1), (IIn-2), (IVa)-(IVl), and (IXa)-(IXr) can be combined with any of the nucleobases described herein (e.g., in Formulas (b1)-(b43) or any other described herein).

Synthesis of Cell Phenotype Altering Polypeptides, Primary Constructs, and mmRNA Molecules

[0456] The cell phenotype altering polypeptides, primary constructs, and mmRNA molecules for use in accordance with the invention may be prepared according to any useful technique, as described herein. The modified nucleosides and nucleotides used in the synthesis of cell phenotype altering polynucleotides, primary constructs, and mmRNA molecules disclosed herein can be prepared from readily available starting materials using the following general methods and procedures. Where typical or preferred process conditions (e.g., reaction temperatures, times, mole ratios of reactants, solvents, pressures, etc.) are provided, a skilled artisan would be able to optimize and develop additional process conditions. Optimum reaction conditions may vary with the particular reactants or solvent used, but such conditions can be determined by one skilled in the art by routine optimization procedures.

[0457] The processes described herein can be monitored according to any suitable method known in the art. For example, product formation can be monitored by spectroscopic means, such as nuclear magnetic resonance spectroscopy (e.g., ¹H or ¹³C) infrared spectroscopy, spectrophotometry (e.g., UV-visible), or mass spectrometry, or by chromatography such as high performance liquid chromatography (HPLC) or thin layer chromatography.

[0458] Preparation of cell phenotype altering polypeptides, primary constructs, and mmRNA molecules of the present invention can involve the protection and deprotection of various chemical groups. The need for protection and deprotection, and the selection of appropriate protecting groups can be readily determined by one skilled in the art. The chemistry of protecting groups can be found, for example, in Greene, et al., Protective Groups in Organic Synthesis, 2d. Ed., Wiley & Sons, 1991, which is incorporated herein by reference in its entirety.

[0459] The reactions of the processes described herein can be carried out in suitable solvents, which can be readily selected by one of skill in the art of organic synthesis. Suitable solvents can be substantially nonreactive with the starting materials (reactants), the intermediates, or products at the temperatures at which the reactions are carried out, i.e., temperatures which can range from the solvent's freezing temperature to the solvent's boiling temperature. A given reaction can be carried out in one solvent or a mixture of more than one solvent. Depending on the particular reaction step, suitable solvents for a particular reaction step can be selected.

[0460] Resolution of racemic mixtures of modified nucleosides and nucleotides can be carried out by any of numerous methods known in the art. An example method includes fractional recrystallization using a “chiral resolving acid” which is an optically active, salt-forming organic acid. Suitable resolving agents for fractional recrystallization methods are, for example, optically active acids, such as the D and L forms of tartaric acid, diacetyltartaric acid, dibenzoyltartaric acid, mandelic acid, malic acid, lactic acid or the various optically active camphorsulfonic acids. Resolution of racemic mixtures can also be carried out by elution on a column packed with an optically active resolving agent (e.g., dinitrobenzoylphenylglycine). Suitable elution solvent composition can be determined by one skilled in the art.

[0461] Modified nucleosides and nucleotides (e.g., building block molecules) can be prepared according to the synthetic methods described in Ogata et al., J. Org. Chem. 74:2585-2588 (2009); Purmal et al., Nucl. Acids Res. 22(1): 72-78, (1994); Fukuhara et al., Biochemistry, 1(4): 563-568 (1962); and Xu et al., Tetrahedron, 48(9): 1729-1740 (1992), each of which are incorporated by reference in their entirety.

[0462] The cell phenotype altering polypeptides, primary constructs, and mmRNA of the invention may or may not be uniformly modified along the entire length of the molecule. For example, one or more or all types of nucleotide (e.g., purine or pyrimidine, or any one or more or all of A, G, U, C) may or may not be uniformly modified in a cell phenotype altering polynucleotide of the invention, or in a given predetermined sequence region thereof (e.g. one or more of the sequence regions represented in FIG. 1). In some embodiments, all nucleotides X in a cell phenotype altering polynucleotide of the invention (or in a given sequence region thereof) are modified, wherein X may any one of nucleotides A, G, U, C, or any one of the combinations A+G, A+U, A+C, G+U, G+C, U+C, A+G+U, A+G+C, G+U+C or A+G+C.

[0463] Different sugar modifications, nucleotide modifications, and/or internucleoside linkages (e.g., backbone structures) may exist at various positions in the cell phenotype altering polynucleotide, primary construct, or mmRNA. One of ordinary skill in the art will appreciate that the nucleotide analogs or other modification(s) may be located at any position(s) of a cell phenotype altering polynucleotide, primary construct, or mmRNA such that the function of the cell phenotype altering polynucleotide, primary construct, or mmRNA is not substantially decreased. A modification may also be a 5′ or 3′ terminal modification. The cell phenotype altering polynucleotide, primary construct, or mmRNA may contain from about 1% to about 100% modified nucleotides (either in relation to overall nucleotide content, or in relation to one or more types of nucleotide, i.e. any one or more of A, G, U or C) or any intervening percentage (e.g., from 1% to 20%, from 1% to 25%, from 1% to 50%, from 1% to 60%, from 1% to 70%, from 1% to 80%, from 1% to 90%, from 1% to 95%, from 10% to 20%, from 10% to 25%, from 10% to 50%, from 10% to 60%, from 10% to 70%, from 10% to 80%, from 10% to 90%, from 10% to 95%, from 10% to 100%, from 20% to 25%, from 20% to 50%, from 20% to 60%, from 20% to 70%, from 20% to 80%, from 20% to 90%, from 20% to 95%, from 20% to 100%, from 50% to 60%, from 50% to 70%, from 50% to 80%, from 50% to 90%, from 50% to 95%, from 50% to 100%, from 70% to 80%, from 70% to 90%, from 70% to 95%, from 70% to 100%, from 80% to 90%, from 80% to 95%, from 80% to 100%, from 90% to 95%, from 90% to 100%, and from 95% to 100%).

[0464] In some embodiments, the cell phenotype altering polynucleotide, primary construct, or mmRNA includes a modified pyrimidine (e.g., a modified uracil/uridine/U or modified cytosine/cytidine/C). In some embodiments, the uracil or uridine (generally: U) in the cell phenotype altering polynucleotide, primary construct, or mmRNA molecule may be replaced with from about 1% to about 100% of a modified uracil or modified uridine (e.g., from 1% to 20%, from 1% to 25%, from 1% to 50%, from 1% to 60%, from 1% to 70%, from 1% to 80%, from 1% to 90%, from 1% to 95%, from 10% to 20%, from 10% to 25%, from 10% to 50%, from 10% to 60%, from 10% to 70%, from 10% to 80%, from 10% to 90%, from 10% to 95%, from 10% to 100%, from 20% to 25%, from 20% to 50%, from 20% to 60%, from 20% to 70%, from 20% to 80%, from 20% to 90%, from 20% to 95%, from 20% to 100%, from 50% to 60%, from 50% to 70%, from 50% to 80%, from 50% to 90%, from 50% to 95%, from 50% to 100%, from 70% to 80%, from 70% to 90%, from 70% to 95%, from 70% to 100%, from 80% to 90%, from 80% to 95%, from 80% to 100%, from 90% to 95%, from 90% to 100%, and from 95% to 100% of a modified uracil or modified uridine). The modified uracil or uridine can be replaced by a compound having a single unique structure or by a plurality of compounds having different structures (e.g., 2, 3, 4 or more unique structures, as described herein).

[0465] In some embodiments, the cytosine or cytidine (generally: C) in the cell phenotype altering polynucleotide, primary construct, or mmRNA molecule may be replaced with from about 1% to about 100% of a modified cytosine or modified cytidine (e.g., from 1% to 20%, from 1% to 25%, from 1% to 50%, from 1% to 60%, from 1% to 70%, from 1% to 80%, from 1% to 90%, from 1% to 95%, from 10% to 20%, from 10% to 25%, from 10% to 50%, from 10% to 60%, from 10% to 70%, from 10% to 80%, from 10% to 90%, from 10% to 95%, from 10% to 100%, from 20% to 25%, from 20% to 50%, from 20% to 60%, from 20% to 70%, from 20% to 80%, from 20% to 90%, from 20% to 95%, from 20% to 100%, from 50% to 60%, from 50% to 70%, from 50% to 80%, from 50% to 90%, from 50% to 95%, from 50% to 100%, from 70% to 80%, from 70% to 90%, from 70% to 95%, from 70% to 100%, from 80% to 90%, from 80% to 95%, from 80% to 100%, from 90% to 95%, from 90% to 100%, and from 95% to 100% of a modified cytosine or modified cytidine). The modified cytosine or cytidine can be replaced by a compound having a single unique structure or by a plurality of compounds having different structures (e.g., 2, 3, 4 or more unique structures, as described herein).

[0466] In some embodiments, the present disclosure provides methods of synthesizing a cell phenotype altering polynucleotide, primary construct, or mmRNA (e.g., the first region, first flanking region, or second flanking region) including n number of linked nucleosides having Formula (Ia-1):

[chemical structure]

comprising:
a) reacting a nucleotide of Formula (IV-1):

[chemical structure]

with a phosphoramidite compound of Formula (V-1):

[chemical structure]

wherein Y⁹ is H, hydroxy, phosphoryl, pyrophosphate, sulfate, amino, thiol, optionally substituted amino acid, or a peptide (e.g., including from 2 to 12 amino acids); and each P¹, P², and P³ is, independently, a suitable protecting group; and [symbol] denotes a solid support;
to provide a polynucleotide, primary construct, or mmRNA of Formula (VI-1):

[chemical structure]

and
b) oxidizing or sulfurizing the polynucleotide, primary construct, or mmRNA of Formula (V) to yield a polynucleotide, primary construct, or mmRNA of Formula (VII-1):

[chemical structure]

and
c) removing the protecting groups to yield the polynucleotide, primary construct, or mmRNA of Formula (Ia).

[0467] In some embodiments, steps a) and b) are repeated from 1 to about 10,000 times. In some embodiments, the methods further comprise a nucleotide (e.g., mmRNA molecule) selected from the group consisting of A, C, G and U adenosine, cytosine, guanosine, and uracil. In some embodiments, the nucleobase may be a pyrimidine or derivative thereof. In some embodiments, the cell phenotype altering polynucleotide, primary construct, or mmRNA is translatable.

[0468] Other components of cell phenotype altering polynucleotides, primary constructs, and mmRNA are optional, and are beneficial in some embodiments. For example, a 5′ untranslated region (UTR) and/or a 3′UTR are provided, wherein either or both may independently contain one or more different nucleotide modifications. In such embodiments, nucleotide modifications may also be present in the translatable region. Also provided are cell phenotype altering polynucleotides, primary constructs, and mmRNA containing a Kozak sequence.

[0469] Exemplary syntheses of modified nucleotides, which are incorporated into a modified cell phenotype altering nucleic acid or mmRNA, e.g., RNA or mRNA, are provided below in Scheme 1 through Scheme 11. Scheme 1 provides a general method for phosphorylation of nucleosides, including modified nucleosides.

[chemical structure]

[0470] Various protecting groups may be used to control the reaction. For example, Scheme 2 provides the use of multiple protecting and deprotecting steps to promote phosphorylation at the 5′ position of the sugar, rather than the 2′ and 3′ hydroxyl groups.

[chemical structure]

[0471] Modified nucleotides can be synthesized in any useful manner. Schemes 3, 4, and 7 provide exemplary methods for synthesizing modified nucleotides having a modified purine nucleobase; and Schemes 5 and 6 provide exemplary methods for synthesizing modified nucleotides having a modified pseudouridine or pseudoisocytidine, respectively.

[chemical structure]

[chemical structure]

[chemical structure]

[chemical structure]

[chemical structure]

[0472] Schemes 8 and 9 provide exemplary syntheses of modified nucleotides. Scheme 10 provides a non-limiting biocatalytic method for producing nucleotides.

[chemical structure]

[chemical structure]

[chemical structure]

[0473] Scheme 11 provides an exemplary synthesis of a modified uracil, where the N1 position is modified with R^{12b}, as provided elsewhere, and the 5′-position of ribose is phosphorylated. T¹, T², R^{12a}, R^{12b}, and r are as provided herein. This synthesis, as well as optimized versions thereof, can be used to modify other pyrimidine nucleobases and purine nucleobases (see e.g., Formulas (b1)-(b43)) and/or to install one or more phosphate groups (e.g., at the 5′ position of the sugar). This alkylating reaction can also be used to include one or more optionally substituted alkyl group at any reactive group (e.g., amino group) in any nucleobase described herein (e.g., the amino groups in the Watson-Crick base-pairing face for cytosine, uracil, adenine, and guanine)

[chemical structure]

Combinations of Nucleotides in mmRNA

[0474] Further examples of modified nucleotides and modified nucleotide combinations are provided below in Table 9. These combinations of modified nucleotides can be used to form the cell phenotype altering polypeptides, primary constructs, or mmRNA of the invention. Unless otherwise noted, the modified nucleotides may be completely substituted for the natural nucleotides of the modified cell phenotype altering nucleic acids or mmRNA of the invention. As a non-limiting example, the natural nucleotide uridine may be substituted with a modified nucleoside described herein. In another non-limiting example, the natural nucleotide uridine may be partially substituted (e.g., about 0.1%, 1%, 5%, 10%, 15%, 20%, 25%, 30%, 35%, 40%, 45%, 50%, 55%, 60%, 65%, 70%, 75%, 80%, 85%, 90%, 95% or 99.9%) with at least one of the modified nucleoside disclosed herein.

TABLE 9

| Modified | |
|---|---|
| Nucleotide | Modified Nucleotide Combination |
| α-thio-cytidine | α-thio-cytidine/5-iodo-uridine |
| | α-thio-cytidine/N1-methyl-pseudo-uridine |
| | α-thio-cytidine/α-thio-uridine |
| | α-thio-cytidine/5-methyl-uridine |
| | α-thio-cytidine/pseudo-uridine |
| | about 50% of the cytosines are α-thio-cytidine |
| pseudoisocytidine | pseudoisocytidine/5-iodo-uridine |
| | pseudoisocytidine/N1-methyl-pseudouridine |
| | pseudoisocytidine/α-thio-uridine |
| | pseudoisocytidine/5-methyl-uridine |
| | pseudoisocytidine/pseudouridine |
| | about 25% of cytosines are pseudoisocytidine |
| | pseudoisocytidine/about 50% of uridines are |
| | N1-methyl-pseudouridine and about 50% of uridines |
| | are pseudouridine |
| | pseudoisocytidine/about 25% of uridines are |
| | N1-methyl-pseudouridine and about 25% of uridines |
| | are pseudouridine |
| pyrrolo-cytidine | pyrrolo-cytidine/5-iodo-uridine |
| | pyrrolo-cytidine/N1-methyl-pseudouridine |
| | pyrrolo-cytidine/α-thio-uridine |
| | pyrrolo-cytidine/5-methyl-uridine |
| | pyrrolo-cytidine/pseudouridine |
| | about 50% of the cytosines are pyrrolo-cytidine |
| 5-methyl-cytidine | 5-methyl-cytidine/5-iodo-uridine |
| | 5-methyl-cytidine/N1-methyl-pseudouridine |
| | 5-methyl-cytidine/α-thio-uridine |
| | 5-methyl-cytidine/5-methyl-uridine |
| | 5-methyl-cytidine/pseudouridine |
| | about 25% of cytosines are 5-methyl-cytidine |
| | about 50% of cytosines are 5-methyl-cytidine |
| | 5-methyl-cytidine/5-methoxy-uridine |
| | 5-methyl-cytidine/5-bromo-uridine |
| | 5-methyl-cytidine/2-thio-uridine |
| | 5-methyl-cytidine/about 50% of uridines are |
| | 2-thio-uridine |
| | about 50% of uridines are 5-methyl-cytidine/ |
| | about 50% of uridines are 2-thio-uridine |
| N4-acetyl-cytidine | N4-acetyl-cytidine/5-iodo-uridine |
| | N4-acetyl-cytidine/N1-methyl-pseudouridine |
| | N4-acetyl-cytidine/α-thio-uridine |
| | N4-acetyl-cytidine/5-methyl-uridine |
| | N4-acetyl-cytidine/pseudouridine |
| | about 50% of cytosines are N4-acetyl-cytidine |
| | about 25% of cytosines are N4-acetyl-cytidine |
| | N4-acetyl-cytidine/5-methoxy-uridine |
| | N4-acetyl-cytidine/5-bromo-uridine |
| | N4-acetyl-cytidine/2-thio-uridine |
| | about 50% of cytosines are N4-acetyl-cytidine/ |
| | about 50% of uridines are 2-thio-uridine |

[0475] Further examples of modified nucleotide combinations are provided below in Table 10. These combinations of modified nucleotides can be used to form the cell phenotype altering polypeptides, primary constructs, or mmRNA of the invention.

TABLE 10

| Modified Nucleotide | Modified Nucleotide Combination |
|---|---|
| modified cytidine having | modified cytidine with (b10)/pseudouridine |
| one or more nucleobases | modified cytidine with (b10)/N1-methyl- |
| of Formula (b10) | pseudouridine |
| | modified cytidine with (b10)/5-methoxy-uridine |
| | modified cytidine with (b10)/5-methyl-uridine |
| | modified cytidine with (b10)/5-bromo-uridine |
| | modified cytidine with (b10)/2-thio-uridine |
| | about 50% of cytidine substituted with modified |
| | cytidine (b10)/about 50% of uridines are |
| | 2-thio-uridine |
| modified cytidine having | modified cytidine with (b32)/pseudouridine |
| one or more nucleobases | modified cytidine with (b32)/N1-methyl- |
| of Formula (b32) | pseudouridine |
| | modified cytidine with (b32)/5-methoxy-uridine |
| | modified cytidine with (b32)/5-methyl-uridine |
| | modified cytidine with (b32)/5-bromo-uridine |
| | modified cytidine with (b32)/2-thio-uridine |
| | about 50% of cytidine substituted with modified |
| | cytidine (b32)/about 50% of uridines are |
| | 2-thio-uridine |
| modified uridine having | modified uridine with (b1)/N4-acetyl-cytidine |
| one or more nucleobases | modified uridine with (b1)/5-methyl-cytidine |
| of Formula (b1) | |
| modified uridine having | modified uridine with (b8)/N4-acetyl-cytidine |
| one or more nucleobases | modified uridine with (b8)/5-methyl-cytidine |
| of Formula (b8) | |
| modified uridine having | modified uridine with (b28)/N4-acetyl-cytidine |
| one or more nucleobases | modified uridine with (b28)/5-methyl-cytidine |
| of Formula (b28) | |
| modified uridine having | modified uridine with (b29)/N4-acetyl-cytidine |
| one or more nucleobases | modified uridine with (b29)/5-methyl-cytidine |
| of Formula (b29) | |
| modified uridine having | modified uridine with (b30)/N4-acetyl-cytidine |
| one or more nucleobases | modified uridine with (b30)/5-methyl-cytidine |
| of Formula (b30) | |

[0476] In some embodiments, at least 25% of the cytosines are replaced by a compound of Formula (b10)-(b14) (e.g., at least about 30%, at least about 35%, at least about 40%, at least about 45%, at least about 50%, at least about 55%, at least about 60%, at least about 65%, at least about 70%, at least about 75%, at least about 80%, at least about 85%, at least about 90%, at least about 95%, or about 100%).

[0477] In some embodiments, at least 25% of the uracils are replaced by a compound of Formula (b1)-(b9) (e.g., at least about 30%, at least about 35%, at least about 40%, at least about 45%, at least about 50%, at least about 55%, at least about 60%, at least about 65%, at least about 70%, at least about 75%, at least about 80%, at least about 85%, at least about 90%, at least about 95%, or about 100%).

[0478] In some embodiments, at least 25% of the cytosines are replaced by a compound of Formula (b10)-(b14), and at least 25% of the uracils are replaced by a compound of Formula (b1)-(b9) (e.g., at least about 30%, at least about 35%, at least about 40%, at least about 45%, at least about 50%, at least about 55%, at least about 60%, at least about 65%, at least about 70%, at least about 75%, at least about 80%, at least about 85%, at least about 90%, at least about 95%, or about 100%).

### IV. PHARMACEUTICAL COMPOSITIONS

### Formulation, Administration, Delivery and Dosing

[0479] The present invention provides cell phenotype altering polynucleotides, primary constructs and mmRNA compositions and complexes in combination with one or more pharmaceutically acceptable excipients. Pharmaceutical compositions may optionally comprise one or more additional active substances, e.g. therapeutically and/or prophylactically active substances. General considerations in the formulation and/or manufacture of pharmaceutical agents may be found, for example, in Remington: The Science and Practice of Pharmacy 21^{st} ed., Lippincott Williams & Wilkins, 2005 (incorporated herein by reference in its entirety).

[0480] In some embodiments, compositions are administered to humans, human patients or subjects. For the purposes of the present disclosure, the phrase “active ingredient” generally refers to cell phenotype altering polynucleotides, primary constructs and mmRNA to be delivered as described herein.

[0481] Although the descriptions of pharmaceutical compositions provided herein are principally directed to pharmaceutical compositions which are suitable for administration to humans, it will be understood by the skilled artisan that such compositions are generally suitable for administration to any other animal, e.g., to non-human animals, e.g. non-human mammals. Modification of pharmaceutical compositions suitable for administration to humans in order to render the compositions suitable for administration to various animals is well understood, and the ordinarily skilled veterinary pharmacologist can design and/or perform such modification with merely ordinary, if any, experimentation. Subjects to which administration of the pharmaceutical compositions is contemplated include, but are not limited to, humans and/or other primates; mammals, including commercially relevant mammals such as cattle, pigs, horses, sheep, cats, dogs, mice, and/or rats; and/or birds, including commercially relevant birds such as poultry, chickens, ducks, geese, and/or turkeys.

[0482] Formulations of the pharmaceutical compositions described herein may be prepared by any method known or hereafter developed in the art of pharmacology. In general, such preparatory methods include the step of bringing the active ingredient into association with an excipient and/or one or more other accessory ingredients, and then, if necessary and/or desirable, dividing, shaping and/or packaging the product into a desired single- or multi-dose unit.

[0483] A pharmaceutical composition in accordance with the invention may be prepared, packaged, and/or sold in bulk, as a single unit dose, and/or as a plurality of single unit doses. As used herein, a “unit dose” is discrete amount of the pharmaceutical composition comprising a predetermined amount of the active ingredient. The amount of the active ingredient is generally equal to the dosage of the active ingredient which would be administered to a subject and/or a convenient fraction of such a dosage such as, for example, one-half or one-third of such a dosage.

[0484] Relative amounts of the active ingredient, the pharmaceutically acceptable excipient, and/or any additional ingredients in a pharmaceutical composition in accordance with the invention will vary, depending upon the identity, size, and/or condition of the subject treated and further depending upon the route by which the composition is to be administered. By way of example, the composition may comprise between 0.1% and 100%, e.g., between 0.5 and 50%, between 1-30%, between 5-80%, at least 80% (w/w) active ingredient

### Formulations

[0485] The cell phenotype altering polynucleotide, primary construct, and mmRNA of the invention can be formulated using one or more excipients to: (1) increase stability; (2) increase cell transfection; (3) permit the sustained or delayed release (e.g., from a depot formulation of the cell phenotype altering polynucleotide, primary construct, or mmRNA); (4) alter the biodistribution (e.g., target the cell phenotype altering polynucleotide, primary construct, or mmRNA to specific tissues or cell types); (5) increase the translation of encoded protein in vivo; and/or (6) alter the release profile of encoded protein in vivo. In addition to traditional excipients such as any and all solvents, dispersion media, diluents, or other liquid vehicles, dispersion or suspension aids, surface active agents, isotonic agents, thickening or emulsifying agents, preservatives, excipients of the present invention can include, without limitation, lipidoids, liposomes, lipid nanoparticles, polymers, lipoplexes, core-shell nanoparticles, peptides, proteins, cells transfected with cell phenotype altering polynucleotide, primary construct, or mmRNA (e.g., for transplantation into a subject), hyaluronidase, nanoparticle mimics and combinations thereof. Accordingly, the formulations of the invention can include one or more excipients, each in an amount that together increases the stability of the cell phenotype altering polynucleotide, primary construct, or mmRNA, increases cell transfection by the cell phenotype altering polynucleotide, primary construct, or mmRNA, increases the expression of cell phenotype altering polynucleotide, primary construct, or mmRNA encoded protein, and/or alters the release profile of cell phenotype altering polynucleotide, primary construct, or mmRNA encoded proteins. Further, the primary construct and mmRNA of the present invention may be formulated using self-assembled nucleic acid nanoparticles.

[0486] Formulations of the pharmaceutical compositions described herein may be prepared by any method known or hereafter developed in the art of pharmacology. In general, such preparatory methods include the step of associating the active ingredient with an excipient and/or one or more other accessory ingredients.

[0487] A pharmaceutical composition in accordance with the present disclosure may be prepared, packaged, and/or sold in bulk, as a single unit dose, and/or as a plurality of single unit doses. As used herein, a “unit dose” refers to a discrete amount of the pharmaceutical composition comprising a predetermined amount of the active ingredient. The amount of the active ingredient may generally be equal to the dosage of the active ingredient which would be administered to a subject and/or a convenient fraction of such a dosage including, but not limited to, one-half or one-third of such a dosage.

[0488] Relative amounts of the active ingredient, the pharmaceutically acceptable excipient, and/or any additional ingredients in a pharmaceutical composition in accordance with the present disclosure may vary, depending upon the identity, size, and/or condition of the subject being treated and further depending upon the route by which the composition is to be administered. For example, the composition may comprise between 0.1% and 99% (w/w) of the active ingredient.

[0489] In some embodiments, the formulations described herein may contain at least one mmRNA. As a non-limiting example, the formulations may contain 1, 2, 3, 4 or 5 mmRNA. In one embodiment the formulation may contain modified mRNA encoding proteins selected from categories such as, but not limited to, human proteins, veterinary proteins, bacterial proteins, biological proteins, antibodies, immunogenic proteins, therapeutic peptides and proteins, secreted proteins, plasma membrane proteins, cytoplasmic and cytoskeletal proteins, intrancellular membrane bound proteins, nuclear proteins, proteins associated with human disease and/or proteins associated with non-human diseases. In one embodiment, the formulation contains at least three modified mRNA encoding proteins. In one embodiment, the formulation contains at least five modified mRNA encoding proteins.

[0490] Pharmaceutical formulations may additionally comprise a pharmaceutically acceptable excipient, which, as used herein, includes, but is not limited to, any and all solvents, dispersion media, diluents, or other liquid vehicles, dispersion or suspension aids, surface active agents, isotonic agents, thickening or emulsifying agents, preservatives, and the like, as suited to the particular dosage form desired. Various excipients for formulating pharmaceutical compositions and techniques for preparing the composition are known in the art (see Remington: The Science and Practice of Pharmacy, 21^{st} Edition, A. R. Gennaro, Lippincott, Williams & Wilkins, Baltimore, Md., 2006; incorporated herein by reference). The use of a conventional excipient medium may be contemplated within the scope of the present disclosure, except insofar as any conventional excipient medium may be incompatible with a substance or its derivatives, such as by producing any undesirable biological effect or otherwise interacting in a deleterious manner with any other component(s) of the pharmaceutical composition.

[0491] In some embodiments, the particle size of the lipid nanoparticle may be increased and/or decreased. The change in particle size may be able to help counter biological reaction such as, but not limited to, inflammation or may increase the biological effect of the modified mRNA delivered to mammals.

[0492] Pharmaceutically acceptable excipients used in the manufacture of pharmaceutical compositions include, but are not limited to, inert diluents, surface active agents and/or emulsifiers, preservatives, buffering agents, lubricating agents, and/or oils. Such excipients may optionally be included in the pharmaceutical formulations of the invention.

### Lipidoids

[0493] The synthesis of lipidoids has been extensively described and formulations containing these compounds are particularly suited for delivery of cell phenotype altering polynucleotides, primary constructs or mmRNA (see Mahon et al., Bioconjug Chem. 2010 21:1448-1454; Schroeder et al., J Intern Med. 2010 267:9-21; Akinc et al., Nat Biotechnol. 2008 26:561-569; Love et al., Proc Natl Acad Sci USA. 2010 107:1864-1869; Siegwart et al., Proc Natl Acad Sci USA. 2011 108:12996-3001; all of which are incorporated herein in their entireties).

[0494] While these lipidoids have been used to effectively deliver double stranded small interfering RNA molecules in rodents and non-human primates (see Akinc et al., Nat Biotechnol. 2008 26:561-569; Frank-Kamenetsky et al., Proc Natl Acad Sci USA. 2008 105:11915-11920; Akinc et al., Mol Ther. 2009 17:872-879; Love et al., Proc Natl Acad Sci USA. 2010 107:1864-1869; Leuschner et al., Nat Biotechnol. 2011 29:1005-1010; all of which is incorporated herein in their entirety), the present disclosure describes their formulation and use in delivering single stranded cell phenotype altering polynucleotides, primary constructs, or mmRNA. Complexes, micelles, liposomes or particles can be prepared containing these lipidoids and therefore, can result in an effective delivery of the cell phenotype altering polynucleotide, primary construct, or mmRNA, as judged by the production of an encoded protein, following the injection of a lipidoid formulation via localized and/or systemic routes of administration. Lipidoid complexes of cell phenotype altering polynucleotides, primary constructs, or mmRNA can be administered by various means including, but not limited to, intravenous, intramuscular, or subcutaneous routes.

[0495] In vivo delivery of nucleic acids may be affected by many parameters, including, but not limited to, the formulation composition, nature of particle PEGylation, degree of loading, oligonucleotide to lipid ratio, and biophysical parameters such as particle size (Akinc et al., Mol Ther. 2009 17:872-879; herein incorporated by reference in its entirety). As an example, small changes in the anchor chain length of poly(ethylene glycol) (PEG) lipids may result in significant effects on in vivo efficacy. Formulations with the different lipidoids, including, but not limited to penta[3-(1-laurylaminopropionyl)]-triethylenetetramine hydrochloride (TETA-5LAP; aka 98N12-5, see Murugaiah et al., Analytical Biochemistry, 401:61 (2010)), C12-200 (including derivatives and variants), and MD1, can be tested for in vivo activity.

[0496] The lipidoid referred to herein as “98N12-5” is disclosed by Akinc et al., Mol Ther. 2009 17:872-879 and is incorporated by reference in its entirety. (See FIG. 2)

[0497] The lipidoid referred to herein as “C12-200” is disclosed by Love et al., Proc Natl Acad Sci USA. 2010 107:1864-1869 (see FIG. 2) and Liu and Huang, Molecular Therapy. 2010 669-670 (see FIG. 2); both of which are herein incorporated by reference in their entirety. The lipidoid formulations can include particles comprising either 3 or 4 or more components in addition to cell phenotype altering polynucleotide, primary construct, or mmRNA. As an example, formulations with certain lipidoids, include, but are not limited to, 98N12-5 and may contain 42% lipidoid, 48% cholesterol and 10% PEG (C14 alkyl chain length). As another example, formulations with certain lipidoids, include, but are not limited to, C12-200 and may contain 50% lipidoid, 10% disteroylphosphatidyl choline, 38.5% cholesterol, and 1.5% PEG-DMG.

[0498] In one embodiment, a cell phenotype altering polynucleotide, primary construct, or mmRNA formulated with a lipidoid for systemic intravenous administration can target the liver. For example, a final optimized intravenous formulation using cell phenotype altering polynucleotide, primary construct, or mmRNA, and comprising a lipid molar composition of 42% 98N12-5, 48% cholesterol, and 10% PEG-lipid with a final weight ratio of about 7.5 to 1 total lipid to cell phenotype altering polynucleotide, primary construct, or mmRNA, and a C14 alkyl chain length on the PEG lipid, with a mean particle size of roughly 50-60 nm, can result in the distribution of the formulation to be greater than 90% to the liver (see, Akinc et al., Mol Ther. 2009 17:872-879; herein incorporated in its entirety). In another example, an intravenous formulation using a C12-200 (see U.S. provisional application 61/175,770 and published international application WO2010129709, each of which is herein incorporated by reference in their entirety) lipidoid may have a molar ratio of 50/10/38.5/1.5 of C12-200/disteroylphosphatidyl choline/cholesterol/PEG-DMG, with a weight ratio of 7 to 1 total lipid to polynucleotide, primary construct, or mmRNA, and a mean particle size of 80 nm may be effective to deliver cell phenotype altering polynucleotide, primary construct, or mmRNA to hepatocytes (see, Love et al., Proc Natl Acad Sci USA. 2010 107:1864-1869 herein incorporated by reference). In another embodiment, an MD1 lipidoid-containing formulation may be used to effectively deliver polynucleotide, primary construct, or mmRNA to hepatocytes in vivo. The characteristics of optimized lipidoid formulations for intramuscular or subcutaneous routes may vary significantly depending on the target cell type and the ability of formulations to diffuse through the extracellular matrix into the blood stream. While a particle size of less than 150 nm may be desired for effective hepatocyte delivery due to the size of the endothelial fenestrae (see, Akinc et al., Mol Ther. 2009 17:872-879 herein incorporated by reference), use of a lipidoid-formulated cell phenotype altering polynucleotide, primary construct, or mmRNA to deliver the formulation to other cells types including, but not limited to, endothelial cells, myeloid cells, and muscle cells may not be similarly size-limited. Use of lipidoid formulations to deliver siRNA in vivo to other non-hepatocyte cells such as myeloid cells and endothelium has been reported (see Akinc et al., Nat Biotechnol. 2008 26:561-569; Leuschner et al., Nat Biotechnol. 2011 29:1005-1010; Cho et al. Adv. Funct. Mater. 2009 19:3112-3118; 8^{th} International Judah Folkman Conference, Cambridge, Mass. Oct. 8-9, 2010 herein incorporated by reference in its entirety). Effective delivery to myeloid cells, such as monocytes, lipidoid formulations may have a similar component molar ratio. Different ratios of lipidoids and other components including, but not limited to, disteroylphosphatidyl choline, cholesterol and PEG-DMG, may be used to optimize the formulation of the cell phenotype altering polynucleotide, primary construct, or mmRNA for delivery to different cell types including, but not limited to, hepatocytes, myeloid cells, muscle cells, etc. For example, the component molar ratio may include, but is not limited to, 50% C12-200, 10% disteroylphosphatidyl choline, 38.5% cholesterol, and %1.5 PEG-DMG (see Leuschner et al., Nat Biotechnol 2011 29:1005-1010; herein incorporated by reference in its entirety). The use of lipidoid formulations for the localized delivery of nucleic acids to cells (such as, but not limited to, adipose cells and muscle cells) via either subcutaneous or intramuscular delivery, may not require all of the formulation components desired for systemic delivery, and as such may comprise only the lipidoid and the cell phenotype altering polynucleotide, primary construct, or mmRNA.

[0499] Combinations of different lipidoids may be used to improve the efficacy of cell phenotype altering polynucleotide, primary construct, or mmRNA directed protein production as the lipidoids may be able to increase cell transfection by the cell phenotype altering polynucleotide, primary construct, or mmRNA; and/or increase the translation of encoded protein (see Whitehead et al., Mol. Ther. 2011, 19:1688-1694, herein incorporated by reference in its entirety).

### Liposomes, Lipoplexes, and Lipid Nanoparticles

[0500] The cell phenotype altering polynucleotide, primary construct, and mmRNA of the invention can be formulated using one or more liposomes, lipoplexes, or lipid nanoparticles. In one embodiment, pharmaceutical compositions of cell phenotype altering polynucleotide, primary construct, or mmRNA include liposomes. Liposomes are artificially-prepared vesicles which may primarily be composed of a lipid bilayer and may be used as a delivery vehicle for the administration of nutrients and pharmaceutical formulations. Liposomes can be of different sizes such as, but not limited to, a multilamellar vesicle (MLV) which may be hundreds of nanometers in diameter and may contain a series of concentric bilayers separated by narrow aqueous compartments, a small unicellular vesicle (SUV) which may be smaller than 50 nm in diameter, and a large unilamellar vesicle (LUV) which may be between 50 and 500 nm in diameter. Liposome design may include, but is not limited to, opsonins or ligands in order to improve the attachment of liposomes to unhealthy tissue or to activate events such as, but not limited to, endocytosis. Liposomes may contain a low or a high pH in order to improve the delivery of the pharmaceutical formulations.

[0501] The formation of liposomes may depend on the physicochemical characteristics such as, but not limited to, the pharmaceutical formulation entrapped and the liposomal ingredients, the nature of the medium in which the lipid vesicles are dispersed, the effective concentration of the entrapped substance and its potential toxicity, any additional processes involved during the application and/or delivery of the vesicles, the optimization size, polydispersity and the shelf-life of the vesicles for the intended application, and the batch-to-batch reproducibility and possibility of large-scale production of safe and efficient liposomal products.

[0502] In one embodiment, pharmaceutical compositions described herein may include, without limitation, liposomes such as those formed from 1,2-dioleyloxy-N,N-dimethylaminopropane (DODMA) liposomes, DiLa2 liposomes from Marina Biotech (Bothell, Wash.), 1,2-dilinoleyloxy-3-dimethylaminopropane (DLin-DMA), 2,2-dilinoleyl-4-(2-dimethylaminoethyl)-[1,3]-dioxolane (DLin-KC2-DMA), and MC3 (US20100324120; herein incorporated by reference in its entirety) and liposomes which may deliver small molecule drugs such as, but not limited to, DOXIL® from Janssen Biotech, Inc. (Horsham, Pa.).

[0503] In one embodiment, pharmaceutical compositions described herein may include, without limitation, liposomes such as those formed from the synthesis of stabilized plasmid-lipid particles (SPLP) or stabilized nucleic acid lipid particle (SNALP) that have been previously described and shown to be suitable for oligonucleotide delivery in vitro and in vivo (see Wheeler et al. Gene Therapy. 1999 6:271-281; Zhang et al. Gene Therapy. 1999 6:1438-1447; Jeffs et al. Pharm Res. 2005 22:362-372; Morrissey et al., Nat Biotechnol. 2005 2:1002-1007; Zimmermann et al., Nature. 2006 441:111-114; Heyes et al. J Contr Rel. 2005 107:276-287; Semple et al. Nature Biotech. 2010 28:172-176; Judge et al. J Clin Invest. 2009 119:661-673; deFougerolles Hum Gene Ther. 2008 19:125-132; all of which are incorporated herein in their entireties). The original manufacture method by Wheeler et al. was a detergent dialysis method, which was later improved by Jeffs et al. and is referred to as the spontaneous vesicle formation method. The liposome formulations are composed of 3 to 4 lipid components in addition to the cell phenotype altering polynucleotide, primary construct, or mmRNA. As an example a liposome can contain, but is not limited to, 55% cholesterol, 20% disteroylphosphatidyl choline (DSPC), 10% PEG-S-DSG, and 15% 1,2-dioleyloxy-N,N-dimethylaminopropane (DODMA), as described by Jeffs et al. As another example, certain liposome formulations may contain, but are not limited to, 48% cholesterol, 20% DSPC, 2% PEG-c-DMA, and 30% cationic lipid, where the cationic lipid can be 1,2-distearloxy-N,N-dimethylaminopropane (DSDMA), DODMA, DLin-DMA, or 1,2-dilinolenyloxy-3-dimethylaminopropane (DLenDMA), as described by Heyes et al.

[0504] In one embodiment, the cell phenotype altering polynucleotides, primary constructs and/or mmRNA may be formulated in a lipid vesicle which may have crosslinks between functionalized lipid bilayers.

[0505] In one embodiment, the cell phenotype altering polynucleotides, primary constructs and/or mmRNA may be formulated in a lipid-polycation complex. The formation of the lipid-polycation complex may be accomplished by methods known in the art and/or as described in U.S. Pub. No. 20120178702, herein incorporated by reference in its entirety. As a non-limiting example, the polycation may include a cationic peptide or a polypeptide such as, but not limited to, polylysine, polyornithine and/or polyarginine. In another embodiment, the cell phenotype altering polynucleotides, primary constructs and/or mmRNA may be formulated in a lipid-polycation complex which may further include a neutral lipid such as, but not limited to, cholesterol or dioleoyl phosphatidylethanolamine (DOPE).

[0506] The liposome formulation may be influenced by, but not limited to, the selection of the cationic lipid component, the degree of cationic lipid saturation, the nature of the PEGylation, ratio of all components and biophysical parameters such as size. In one example by Semple et al. (Semple et al. Nature Biotech. 2010 28:172-176), the liposome formulation was composed of 57.1% cationic lipid, 7.1% dipalmitoylphosphatidylcholine, 34.3% cholesterol, and 1.4% PEG-c-DMA. As another example, changing the composition of the cationic lipid could more effectively deliver siRNA to various antigen presenting cells (Basha et al. Mol Ther. 2011 19:2186-2200; herein incorporated by reference in its entirety).

[0507] In some embodiments, the ratio of PEG in the LNP formulations may be increased or decreased and/or the carbon chain length of the PEG lipid may be modified from C14 to C18 to alter the pharmacokinetics and/or biodistribution of the LNP formulations. As a non-limiting example, LNP formulations may contain 1-5% of the lipid molar ratio of PEG-c-DOMG as compared to the cationic lipid, DSPC and cholesterol. In another embodiment the PEG-c-DOMG may be replaced with a PEG lipid such as, but not limited to, PEG-DSG (1,2-Distearoyl-sn-glycerol, methoxypolyethylene glycol) or PEG-DPG (1,2-Dipalmitoyl-sn-glycerol, methoxypolyethylene glycol). The cationic lipid may be selected from any lipid known in the art such as, but not limited to, DLin-MC3-DMA, DLin-DMA, C12-200 and DLin-KC2-DMA.

[0508] In one embodiment, the cationic lipid may be selected from, but not limited to, a cationic lipid described in International Publication Nos. WO2012040184, WO2011153120, WO2011149733, WO2011090965, WO2011043913, WO2011022460, WO2012061259, WO2012054365, WO2012044638, WO2010080724, WO201021865 and WO2008103276, U.S. Pat. Nos. 7,893,302 and 7,404,969 and US Patent Publication No. US20100036115; each of which is herein incorporated by reference in their entirety. In another embodiment, the cationic lipid may be selected from, but not limited to, formula A described in International Publication Nos. WO2012040184, WO2011153120, WO2011149733, WO2011090965, WO2011043913, WO2011022460, WO2012061259, WO2012054365 and WO2012044638; each of which is herein incorporated by reference in their entirety. In yet another embodiment, the cationic lipid may be selected from, but not limited to, formula CLI-CLXXIX of International Publication No. WO2008103276, formula CLI-CLXXIX of U.S. Pat. No. 7,893,302, formula CLI-CLXXXXII of U.S. Pat. No. 7,404,969 and formula I-VI of US Patent Publication No. US20100036115; each of which is herein incorporated by reference in their entirety. As a non-limiting example, the cationic lipid may be selected from (20Z,23Z)—N,N-dimethylnonacosa-20,23-dien-10-amine, (17Z,20Z)—N,N-dimemylhexacosa-17,20-dien-9-amine, (1Z,19Z)—N5N˜dimethylpentacosa-16,19-dien-8-amine, (13Z,16Z)—N,N-dimethyldocosa-13J16-dien-5-amine, (12Z,15Z)—N,N-dimethylhenicosa-12,15-dien-4-amine, (14Z,17Z)—N,N-dimethyltricosa-14,17-dien-6-amine, (15Z,18Z)—N,N-dimethyltetracosa-15,18-dien-7-amine, (18Z,21Z)—N,N-dimethylheptacosa-18,21-dien-10-amine, (15Z,18Z)—N,N-dimethyltetracosa-15,18-dien-5-amine, (14Z,17Z)—N,N-dimethyltricosa-14,17-dien-4-amine, (19Z,22Z)—N,N-dimeihyloctacosa-19,22-dien-9-amine, (18Z,21Z)—N,N-dimethylheptacosa-18,21-dien-8-amine, (17Z,20Z)—N,N-dimethylhexacosa-17,20-dien-7-amine, (16Z;19Z)—N,N-dimethylpentacosa-16,19-dien-6-amine, (22Z,25Z)—N,N-dimethylhentriaconta-22,25-dien-10-amine, (21Z,24Z)—N;N-dimethyltriaconta-21,24-dien-9-amine, (18Z)—N,N-dimetylheptacos-18-en-10-amine, (17Z)—N,N-dimethylhexacos-17-en-9-amine, (19Z,22Z)—N,N-dimethyloctacosa-19,22-dien-7-amine, N,N-dimethylheptacosan-10-amine, (20Z,23Z)—N-ethyl-N-methylnonacosa-20J23-dien-10-amine, 1-[(11Z,14Z)-1-nonylicosa-11,14-dien-1-yl]pyrrolidine, (20Z)—N,N-dimethylheptacos-20-en-10-amine, (15Z)—N,N-dimethyl eptacos-15-en-10-amine, (14Z)—N,N-dimethylnonacos-14-en-10-amine, (17Z)—N,N-dimethylnonacos-17-en-10-amine, (24Z)—N,N-dimethyltritriacont-24-en-10-amine, (20Z)—N,N-dimethylnonacos-20-en-10-amine, (22Z)—N,N-dimethylhentriacont-22-en-10-amine, (16Z)—N,N-dimethylpentacos-16-en-8-amine, (12Z,15Z)—N,N-dimethyl-2-nonylhenico sa-12,15-dien-1-amine, (13Z,16Z)—N,N-dimethyl-3-nonyldocosa-13,16-dien-1-amine, N,N-dimethyl-1-[(1S,2R)-2-octylcyclopropyl]eptadecan-8-amine, 1-[(1S,2R)-2-hexylcyclopropyl]-N,N-dimethylnonadecan-10-amine, N,N-dimethyl-1-[(1S,2R)-2-octylcyclopropyl]nonadecan-10-amine, N,N-dimethyl-21˜[(1S,2R)-2-octylcyclopropyl]henicosan-10-amine, N,N-dimethyl-1-[(1S,2S)-2-{[(1R,2R)-2-pentylcyclopropyl]methyl}cyclopropyl]nonadecan-10-amine, N,N-dimethyl-1-[(1S,2R)-2-octylcyclopropyl]hexadecan-8-amine, N,N-dimethyH-[(1R,2S)-2-undecyIcyclopropyl]tetradecan-5-amine, N,N-dimethyl-3-{7-[(1S,2R)-2-octylcyclopropyl]heptyl}dodecan-1-amine, 1-[(1R,2S)-2-heptylcyclopropy1]-N,N-dimethyloctadecan-9-amine, 1-[(1S,2R)-2-decylcyclopropyl]-N,N-dimethylpentadecan-6-amine, N,N-dimethyl-1-[(1S,2R)-2-octylcyclopropyl]pentadecan-8-amine, R—N,N-dimethyl-1-[(9Z,12Z)-octadeca-9,12-dien-1-yloxy]-3-(octyloxy)propan-2-amine, S—N,N-dimethyl-1-[(9Z,12Z)-octadeca-9,12-dien-1-yloxy]-3-(octyloxy)propan-2-amine, 1-{2-[(9Z,12Z)-octadeca-9,12-dien-1-yloxy]-1-[(octyloxy) methyl]ethyl}pyrrolidine, (2S)—N,N-dimethyl-1-[(9Z,12Z)-octadeca-9,12-dien-1-yloxy]-3-[(5Z)-oct-5-en-1-yloxy]propan-2-amine, 1-{2-[(9Z,12Z)-octadeca-9,12-dien-1-yloxy]-1-[(octyloxy) methyl]ethyl}azetidine, (2S)-1-(hexyloxy)-N,N-dimethyl-3-[(9Z,12Z)-octadeca-9,12-dien-1-yloxy]propan-2-amine, (2S)-1-(heptyloxy)-N,N-dimethyl-3-[(9Z,12Z)-octadeca-9,12-dien-1-yloxy]propan-2-amine, N,N-dimethyl-1-(nonyloxy)-3-[(9Z,12Z)-octadeca-9,12-dien-1-yloxy]propan-2-amine, N,N-dimethyl-1-[(9Z)-octadec-9-en-1-yloxy]-3-(octyloxy)propan-2-amine (Compound 9); (2S)—N,N-dimethyl-1-[(6Z,9Z,12Z)-octadeca-6,9,12-trien-1-yloxy]-3-(octyloxy)propan-2-amine, (2S)-1-[(11Z,14Z)-icosa-11,14-dien-1-yloxy]-N,N-dimethyl-3-(pentyloxy)propan-2-amine, (2S)-1-(hexyloxy)-3-[(11Z,14Z)-icosa-11,14-dien-1-yloxy]-N,N-dimethylpropan-2-amine, 1-[(11Z,14Z)-icosa-11,14-dien-1-yloxy]-N,N-dimethyl-3-(octyloxy)propan-2-amine, 1-[(13Z,16Z)-docosa-13,16-dien-1-yloxy]-N,N-dimethyl-3-(octyloxy)propan-2-amine, (2S)-1-[(13Z,16Z)-docosa-13,16-dien-1-yloxy]-3-(hexyloxy)-N,N-dimethylpropan-2-amine, (2S)-1-[(13Z)-docos-13-en-1-yloxy]-3-(hexyloxy)-N,N-dimethylpropan-2-amine, 1-[(13Z)-docos-13-en-1-yloxy]-N,N-dimethyl-3-(octyloxy)propan-2-amine, 1-[(9Z)-hexadec-9-en-1-yloxy]-N,N-dimethyl-3-(octyloxy)propan-2-amine, (2R)—N,N-dimethyl-H(1-metoyloctyl)oxy]-3-[(9Z,12Z)-octadeca-9,12-dien-1-yloxy]propan-2-amine, (2R)-1-[(3,7-dimethyloctyl)oxy]-N,N-dimethyl-3-[(9Z,12Z)-octadeca-9,12-dien-1-yloxy]propan-2-amine, N,N-dimethyl-1-(octyloxy)-3-({8-[(1S,2S)-2-{[(1R,2R)-2-pentylcyclopropyl]methyl}cyclopropyl]octyl}oxy)propan-2-amine, N,N-dimethyl-1-{[8-(2-oclylcyclopropyl)octyl]oxy}-3-(octyloxy)propan-2-amine and (11E,20Z,23Z)—N;N-dimethylnonacosa-11,20,2-trien-10-amine or a pharmaceutically acceptable salt or stereoisomer thereof.

[0509] In one embodiment, the cationic lipid may be synthesized by methods known in the art and/or as described in International Publication Nos. WO2012040184, WO2011153120, WO2011149733, WO2011090965, WO2011043913, WO2011022460, WO2012061259, WO2012054365, WO2012044638, WO2010080724 and WO201021865; each of which is herein incorporated by reference in their entirety.

[0510] In one embodiment, the LNP formulations of the cell phenotype altering polynucleotides, primary constructs and/or mmRNA may contain PEG-c-DOMG 3% lipid molar ratio. In another embodiment, the LNP formulations of the cell phenotype altering polynucleotides, primary constructs and/or mmRNA may contain PEG-c-DOMG 1.5% lipid molar ratio.

[0511] In one embodiment, the pharmaceutical compositions of the cell phenotype altering polynucleotides, primary constructs and/or mmRNA may include at least one of the PEGylated lipids described in International Publication No. 2012099755, herein incorporated by reference.

[0512] In one embodiment, the LNP formulation may contain PEG-DMG 2000 (1,2-dimyristoyl-sn-glycero-3-phophoethanolamine-N-[methoxy(polyethylene glycol)-2000). In one embodiment, the LNP formulation may contain PEG-DMG 2000, a cationic lipid known in the art and at least one other component. In another embodiment, the LNP formulation may contain PEG-DMG 2000, a cationic lipid known in the art, DSPC and cholesterol. As a non-limiting example, the LNP formulation may contain PEG-DMG 2000, DLin-DMA, DSPC and cholesterol. As another non-limiting example the LNP formulation may contain PEG-DMG 2000, DLin-DMA, DSPC and cholesterol in a molar ratio of 2:40:10:48 (see Geall et al., Nonviral delivery of self-amplifying RNA vaccines, PNAS 2012; PMID: 22908294).

[0513] In one embodiment, the LNP formulation may be formulated by the methods described in International Publication Nos. WO2011127255 or WO2008103276, each of which is herein incorporated by reference in their entirety. As a non-limiting example, modified RNA described herein may be encapsulated in LNP formulations as described in WO2011127255 and/or WO2008103276; each of which is herein incorporated by reference in their entirety.

[0514] In one embodiment, LNP formulations described herein may comprise a polycationic composition. As a non-limiting example, the polycationic composition may be selected from formula 1-60 of US Patent Publication No. US20050222064; herein incorporated by reference in its entirety. In another embodiment, the LNP formulations comprising a polycationic composition may be used for the delivery of the modified RNA described herein in vivo and/or in vitro.

[0515] In one embodiment, the LNP formulations described herein may additionally comprise a permeability enhancer molecule. Non-limiting permeability enhancer molecules are described in US Patent Publication No. US20050222064; herein incorporated by reference in its entirety.

[0516] In one embodiment, the pharmaceutical compositions may be formulated in liposomes such as, but not limited to, DiLa2 liposomes (Marina Biotech, Bothell, Wash.), SMARTICLES® (Marina Biotech, Bothell, Wash.), neutral DOPC (1,2-dioleoyl-sn-glycero-3-phosphocholine) based liposomes (e.g., siRNA delivery for ovarian cancer (Landen et al. Cancer Biology & Therapy 2006 5(12)1708-1713)) and hyaluronan-coated liposomes (Quiet Therapeutics, Israel).

[0517] Lipid nanoparticle formulations may be improved by replacing the cationic lipid with a biodegradable cationic lipid which is known as a rapidly eliminated lipid nanoparticle (reLNP). Ionizable cationic lipids, such as, but not limited to, DLinDMA, DLin-KC2-DMA, and DLin-MC3-DMA, have been shown to accumulate in plasma and tissues over time and may be a potential source of toxicity. The rapid metabolism of the rapidly eliminated lipids can improve the tolerability and therapeutic index of the lipid nanoparticles by an order of magnitude from a 1 mg/kg dose to a 10 mg/kg dose in rat. Inclusion of an enzymatically degraded ester linkage can improve the degradation and metabolism profile of the cationic component, while still maintaining the activity of the reLNP formulation. The ester linkage can be internally located within the lipid chain or it may be terminally located at the terminal end of the lipid chain. The internal ester linkage may replace any carbon in the lipid chain.

[0518] In one embodiment, the internal ester linkage may be located on either side of the saturated carbon. Non-limiting examples of reLNPs include,

[chemical structure]

[0519] In one embodiment, an immune response may be elicited by delivering a lipid nanoparticle which may include a nanospecies, a polymer and an immunogen. (U.S. Publication No. 20120189700 and International Publication No. WO2012099805; each of which is herein incorporated by reference in their entirety). The polymer may encapsulate the nanospecies or partially encapsulate the nanospecies.

[0520] Lipid nanoparticles may be engineered to alter the surface properties of particles so the lipid nanoparticles may penetrate the mucosal barrier. Mucus is located on mucosal tissue such as, but not limited to, oral (e.g., the buccal and esophageal membranes and tonsil tissue), ophthalmic, gastrointestinal (e.g., stomach, small intestine, large intestine, colon, rectum), nasal, respiratory (e.g., nasal, pharyngeal, tracheal and bronchial membranes), genital (e.g., vaginal, cervical and urethral membranes). Nanoparticles larger than 10-200 nm which are preferred for higher drug encapsulation efficiency and the ability to provide the sustained delivery of a wide array of drugs have been thought to be too large to rapidly diffuse through mucosal barriers. Mucus is continuously secreted, shed, discarded or digested and recycled so most of the trapped particles may be removed from the mucosla tissue within seconds or within a few hours. Large polymeric nanoparticles (200 nm-500 nm in diameter) which have been coated densely with a low molecular weight polyethylene glycol (PEG) diffused through mucus only 4 to 6-fold lower than the same particles diffusing in water (Lai et al. PNAS 2007 104(5):1482-487; Lai et al. Adv Drug Deliv Rev. 2009 61(2): 158-171; each of which is herein incorporated by reference in their entirety). The transport of nanoparticles may be determined using rates of permeation and/or fluorescent microscopy techniques including, but not limited to, fluorescence recovery after photobleaching (FRAP) and high resolution multiple particle tracking (MPT).

[0521] The lipid nanoparticle engineered to penetrate mucus may comprise a polymeric material (i.e. a polymeric core) and/or a polymer-vitamin conjugate and/or a tri-block co-polymer. The polymeric material may include, but is not limited to, polyamines, polyethers, polyamides, polyesters, polycarbamates, polyureas, polycarbonates, poly(styrenes), polyimides, polysulfones, polyurethanes, polyacetylenes, polyethylenes, polyethyeneimines, polyisocyanates, polyacrylates, polymethacrylates, polyacrylonitriles, and polyarylates. The polymeric material may be biodegradable and/or biocompatible. Non-limiting examples of specific polymers include poly(caprolactone) (PCL), ethylene vinyl acetate polymer (EVA), poly(lactic acid) (PLA), poly(L-lactic acid) (PLLA), poly(glycolic acid) (PGA), poly(lactic acid-co-glycolic acid) (PLGA), poly(L-lactic acid-co-glycolic acid) (PLLGA), poly(D,L-lactide) (PDLA), poly(L-lactide) (PLLA), poly(D,L-lactide-co-caprolactone), poly(D,L-lactide-co-caprolactone-co-glycolide), poly(D,L-lactide-co-PEO-co-D,L-lactide), poly(D,L-lactide-co-PPO-co-D,L-lactide), polyalkyl cyanoacralate, polyurethane, poly-L-lysine (PLL), hydroxypropyl methacrylate (HPMA), polyethyleneglycol, poly-L-glutamic acid, poly(hydroxy acids), polyanhydrides, polyorthoesters, poly(ester amides), polyamides, poly(ester ethers), polycarbonates, polyalkylenes such as polyethylene and polypropylene, polyalkylene glycols such as poly(ethylene glycol) (PEG), polyalkylene oxides (PEO), polyalkylene terephthalates such as poly(ethylene terephthalate), polyvinyl alcohols (PVA), polyvinyl ethers, polyvinyl esters such as poly(vinyl acetate), polyvinyl halides such as poly(vinyl chloride) (PVC), polyvinylpyrrolidone, polysiloxanes, polystyrene (PS), polyurethanes, derivatized celluloses such as alkyl celluloses, hydroxyalkyl celluloses, cellulose ethers, cellulose esters, nitro celluloses, hydroxypropylcellulose, carboxymethylcellulose, polymers of acrylic acids, such as poly(methyl(meth)acrylate) (PMMA), poly(ethyl(meth)acrylate), poly(butyl(meth)acrylate), poly(isobutyl(meth)acrylate), poly(hexyl(meth)acrylate), poly(isodecyl(meth)acrylate), poly(lauryl(meth)acrylate), poly(phenyl(meth)acrylate), poly(methyl acrylate), poly(isopropyl acrylate), poly(isobutyl acrylate), poly(octadecyl acrylate) and copolymers and mixtures thereof, polydioxanone and its copolymers, polyhydroxyalkanoates, polypropylene fumarate, polyoxymethylene, poloxamers, poly(ortho)esters, poly(butyric acid), poly(valeric acid), poly(lactide-co-caprolactone), and trimethylene carbonate, polyvinylpyrrolidone. The lipid nanoparticle may be coated or associated with a co-polymer such as, but not limited to, a block co-polymer, and (poly(ethylene glycol))-(poly(propylene oxide))-(poly(ethylene glycol)) triblock copolymer (see US Publication 20120121718 and US Publication 20100003337; each of which is herein incorporated by reference in their entirety). The co-polymer may be a polymer that is generally regarded as safe (GRAS) and the formation of the lipid nanoparticle may be in such a way that no new chemical entities are created. For example, the lipid nanoparticle may comprise poloxamers coating PLGA nanoparticles without forming new chemical entities which are still able to rapidly penetrate human mucus (Yang et al. Angew. Chem. Int. Ed. 2011 50:2597-2600; herein incorporated by reference in its entirety).

[0522] The vitamin of the polymer-vitamin conjugate may be vitamin E. The vitamin portion of the conjugate may be substituted with other suitable components such as, but not limited to, vitamin A, vitamin E, other vitamins, cholesterol, a hydrophobic moiety, or a hydrophobic component of other surfactants (e.g., sterol chains, fatty acids, hydrocarbon chains and alkylene oxide chains).

[0523] The lipid nanoparticle engineered to penetrate mucus may include surface altering agents such as, but not limited to, cell phenotype altering mmRNA, anionic protein (e.g., bovine serum albumin), surfactants (e.g., cationic surfactants such as for example dimethyldioctadecyl-ammonium bromide), sugars or sugar derivatives (e.g., cyclodextrin), nucleic acids, polymers (e.g., heparin, polyethylene glycol and poloxamer), mucolytic agents (e.g., N-acetylcysteine, mugwort, bromelain, papain, clerodendrum, acetylcysteine, bromhexine, carbocisteine, eprazinone, mesna, ambroxol, sobrerol, domiodol, letosteine, stepronin, tiopronin, gelsolin, thymosin (34 dornase alfa, neltenexine, erdosteine) and various DNases including rhDNase. The surface altering agent may be embedded or enmeshed in the particle's surface or disposed (e.g., by coating, adsorption, covalent linkage, or other process) on the surface of the lipid nanoparticle. (see US Publication 20100215580 and US Publication 20080166414; each of which is herein incorporated by reference in their entirety).

[0524] The mucus penetrating lipid nanoparticles may comprise at least one cell phenotype altering mmRNA described herein. The mmRNA may be encapsulated in the lipid nanoparticle and/or disposed on the surface of the paricle. The mmRNA may be covalently coupled to the lipid nanoparticle. Formulations of mucus penetrating lipid nanoparticles may comprise a plurality of nanoparticles. Further, the formulations may contain particles which may interact with the mucus and alter the structural and/or adhesive properties of the surrounding mucus to decrease mucoadhesion which may increase the delivery of the mucus penetrating lipid nanoparticles to the mucosal tissue.

[0525] In one embodiment, the cell phenotype altering polynucleotide, primary construct, or mmRNA is formulated as a lipoplex, such as, without limitation, the ATUPLEX™ system, the DACC system, the DBTC system and other siRNA-lipoplex technology from Silence Therapeutics (London, United Kingdom), STEMFECT™ from STEMGENT® (Cambridge, Mass.), and polyethylenimine (PEI) or protamine-based targeted and non-targeted delivery of nucleic acids acids (Aleku et al. Cancer Res. 2008 68:9788-9798; Strumberg et al. Int J Clin Pharmacol Ther 2012 50:76-78; Santel et al., Gene Ther 2006 13:1222-1234; Santel et al., Gene Ther 2006 13:1360-1370; Gutbier et al., Pulm Pharmacol. Ther. 2010 23:334-344; Kaufmann et al. Microvasc Res 2010 80:286-293 Weide et al. J Immunother. 2009 32:498-507; Weide et al. J Immunother. 2008 31:180-188; Pascolo Expert Opin. Biol. Ther. 4:1285-1294; Fotin-Mleczek et al., 2011 J. Immunother. 34:1-15; Song et al., Nature Biotechnol. 2005, 23:709-717; Peer et al., Proc Natl Acad Sci USA. 2007 6; 104:4095-4100; deFougerolles Hum Gene Ther. 2008 19:125-132; all of which are incorporated herein by reference in its entirety).

[0526] In one embodiment such formulations may also be constructed or compositions altered such that they passively or actively are directed to different cell types in vivo, including but not limited to hepatocytes, immune cells, tumor cells, endothelial cells, antigen presenting cells, and leukocytes (Akinc et al. Mol Ther. 2010 18:1357-1364; Song et al., Nat Biotechnol. 2005 23:709-717; Judge et al., J Clin Invest. 2009 119:661-673; Kaufmann et al., Microvasc Res 2010 80:286-293; Santel et al., Gene Ther 2006 13:1222-1234; Santel et al., Gene Ther 2006 13:1360-1370; Gutbier et al., Pulm Pharmacol. Ther. 2010 23:334-344; Basha et al., Mol. Ther. 2011 19:2186-2200; Fenske and Cullis, Expert Opin Drug Deliv. 2008 5:25-44; Peer et al., Science. 2008 319:627-630; Peer and Lieberman, Gene Ther. 2011 18:1127-1133; all of which are incorporated herein by reference in its entirety). One example of passive targeting of formulations to liver cells includes the DLin-DMA, DLin-KC2-DMA and MC3-based lipid nanoparticle formulations which have been shown to bind to apolipoprotein E and promote binding and uptake of these formulations into hepatocytes in vivo (Akinc et al. Mol Ther. 2010 18:1357-1364; herein incorporated by reference in its entirety). Formulations can also be selectively targeted through expression of different ligands on their surface as exemplified by, but not limited by, folate, transferrin, N-acetylgalactosamine (GalNAc), and antibody targeted approaches (Kolhatkar et al., Curr Drug Discov Technol. 2011 8:197-206; Musacchio and Torchilin, Front Biosci. 2011 16:1388-1412; Yu et al., Mol Membr Biol. 2010 27:286-298; Patil et al., Crit Rev Ther Drug Carrier Syst. 2008 25:1-61; Benoit et al., Biomacromolecules. 2011 12:2708-2714 Zhao et al., Expert Opin Drug Deliv. 2008 5:309-319; Akinc et al., Mol Ther. 2010 18:1357-1364; Srinivasan et al., Methods Mol Biol. 2012 820:105-116; Ben-Arie et al., Methods Mol Biol. 2012 757:497-507; Peer 2010 J Control Release. 20:63-68; Peer et al., Proc Natl Acad Sci USA. 2007 104:4095-4100; Kim et al., Methods Mol Biol. 2011 721:339-353; Subramanya et al., Mol Ther. 2010 18:2028-2037; Song et al., Nat Biotechnol. 2005 23:709-717; Peer et al., Science. 2008 319:627-630; Peer and Lieberman, Gene Ther. 2011 18:1127-1133; all of which are incorporated herein by reference in its entirety).

[0527] In one embodiment, the cell phenotype altering polynucleotide, primary construct, or mmRNA is formulated as a solid lipid nanoparticle. A solid lipid nanoparticle (SLN) may be spherical with an average diameter between 10 to 1000 nm. SLN possess a solid lipid core matrix that can solubilize lipophilic molecules and may be stabilized with surfactants and/or emulsifiers. In a further embodiment, the lipid nanoparticle may be a self-assembly lipid-polymer nanoparticle (see Zhang et al., ACS Nano, 2008, 2 (8), pp 1696-1702; herein incorporated by reference in its entirety).

[0528] Liposomes, lipoplexes, or lipid nanoparticles may be used to improve the efficacy of polynucleotide, primary construct, or mmRNA directed protein production as these formulations may be able to increase cell transfection by the polynucleotide, primary construct, or mmRNA; and/or increase the translation of encoded protein. One such example involves the use of lipid encapsulation to enable the effective systemic delivery of polyplex plasmid DNA (Heyes et al., Mol Ther. 2007 15:713-720; herein incorporated by reference in its entirety). The liposomes, lipoplexes, or lipid nanoparticles may also be used to increase the stability of the cell phenotype altering polynucleotide, primary construct, or mmRNA.

[0529] In one embodiment, the cell phenotype altering polynucleotides, primary constructs, and/or the mmRNA of the present invention can be formulated for controlled release and/or targeted delivery. As used herein, “controlled release” refers to a pharmaceutical composition or compound release profile that conforms to a particular pattern of release to effect a therapeutic outcome. In one embodiment, the cell phenotype altering polynucleotides, primary constructs or the mmRNA may be encapsulated into a delivery agent described herein and/or known in the art for controlled release and/or targeted delivery. As used herein, the term “encapsulate” means to enclose, surround or encase. As it relates to the formulation of the compounds of the invention, encapsulation may be substantial, complete or partial. The term “substantially encapsulated” means that at least greater than 50, 60, 70, 80, 85, 90, 95, 96, 97, 98, 99, 99.9, 99.9 or greater than 99.999% of the pharmaceutical composition or compound of the invention may be enclosed, surrounded or encased within the delivery agent. “Partially encapsulation” means that less than 10, 10, 20, 30, 40 50 or less of the pharmaceutical composition or compound of the invention may be enclosed, surrounded or encased within the delivery agent. Advantageously, encapsulation may be determined by measuring the escape or the activity of the pharmaceutical composition or compound of the invention using fluorescence and/or electron micrograph. For example, at least 1, 5, 10, 20, 30, 40, 50, 60, 70, 80, 85, 90, 95, 96, 97, 98, 99, 99.9, 99.99 or greater than 99.99% of the pharmaceutical composition or compound of the invention are encapsulated in the delivery agent.

[0530] In another embodiment, the cell phenotype altering polynucleotides, primary constructs, or the mmRNA may be encapsulated into a lipid nanoparticle or a rapidly eliminating lipid nanoparticle and the lipid nanoparticles or a rapidly eliminating lipid nanoparticle may then be encapsulated into a polymer, hydrogel and/or surgical sealant described herein and/or known in the art. As a non-limiting example, the polymer, hydrogel or surgical sealant may be PLGA, ethylene vinyl acetate (EVAc), poloxamer, GELSITE® (Nanotherapeutics, Inc. Alachua, Fla.), HYLENEX® (Halozyme Therapeutics, San Diego Calif.), surgical sealants such as fibrinogen polymers (Ethicon Inc. Cornelia, Ga.), TISSELL® (Baxter International, Inc Deerfield, Ill.), PEG-based sealants, and COSEAL® (Baxter International, Inc Deerfield, Ill.).

[0531] In one embodiment, the lipid nanoparticle may be encapsulated into any polymer or hydrogel known in the art which may form a gel when injected into a subject. As another non-limiting example, the lipid nanoparticle may be encapsulated into a polymer matrix which may be biodegradable.

[0532] In one embodiment, the cell phenotype altering polynucleotide, primary construct, or mmRNA formulation for controlled release and/or targeted delivery may also include at least one controlled release coating. Controlled release coatings include, but are not limited to, OPADRY®, polyvinylpyrrolidone/vinyl acetate copolymer, polyvinylpyrrolidone, hydroxypropyl methylcellulose, hydroxypropyl cellulose, hydroxyethyl cellulose, EUDRAGIT RL®, EUDRAGIT RS® and cellulose derivatives such as ethylcellulose aqueous dispersions (AQUACOAT® and SURELEASE®).

[0533] In one embodiment, the controlled release and/or targeted delivery formulation may comprise at least one degradable polyester which may contain polycationic side chains. Degradeable polyesters include, but are not limited to, poly(serine ester), poly(L-lactide-co-L-lysine), poly(4-hydroxy-L-proline ester), and combinations thereof. In another embodiment, the degradable polyesters may include a PEG conjugation to form a PEGylated polymer.

[0534] In one embodiment, the cell phenotype altering polynucleotides, primary constructs, and/or the mmRNA of the present invention may be encapsulated in a therapeutic nanoparticle. Therapeutic nanoparticles may be formulated by methods described herein and known in the art such as, but not limited to, International Pub Nos. WO2010005740, WO2010030763, WO2010005721, WO2010005723, WO2012054923, US Pub. Nos. US20110262491, US20100104645, US20100087337, US20100068285, US20110274759, US20100068286, and U.S. Pat. No. 8,206,747; each of which is herein incorporated by reference in their entirety. In another embodiment, therapeutic polymer nanoparticles may be identified by the methods described in US Pub No. US20120140790, herein incorporated by reference in its entirety.

[0535] In one embodiment, the therapeutic nanoparticle of may be formulated for sustained release. As used herein, “sustained release” refers to a pharmaceutical composition or compound that conforms to a release rate over a specific period of time. The period of time may include, but is not limited to, hours, days, weeks, months and years. As a non-limiting example, the sustained release nanoparticle may comprise a polymer and a therapeutic agent such as, but not limited to, the polynucleotides, primary constructs, and mmRNA of the present invention (see International Pub No. 2010075072 and US Pub No. US20100216804 and US20110217377, each of which is herein incorporated by reference in their entirety).

[0536] In one embodiment, the therapeutic nanoparticles may be formulated to be target specific. As a non-limiting example, the therapeutic nanoparticles may include a corticosteroid (see International Pub. No. WO2011084518). In one embodiment, the therapeutic nanoparticles may be formulated to be cancer specific. As a non-limiting example, the therapeutic nanoparticles may be formulated in nanoparticles described in International Pub No. WO2008121949, WO2010005726, WO2010005725, WO2011084521 and US Pub No. US20100069426, US20120004293 and US20100104655, each of which is herein incorporated by reference in their entirety.

[0537] In one embodiment, the nanoparticles of the present invention may comprise a polymeric matrix. As a non-limiting example, the nanoparticle may comprise two or more polymers such as, but not limited to, polyethylenes, polycarbonates, polyanhydrides, polyhydroxyacids, polypropylfumerates, polycaprolactones, polyamides, polyacetals, polyethers, polyesters, poly(orthoesters), polycyanoacrylates, polyvinyl alcohols, polyurethanes, polyphosphazenes, polyacrylates, polymethacrylates, polycyanoacrylates, polyureas, polystyrenes, polyamines, polylysine, poly(ethylene imine), poly(serine ester), poly(L-lactide-co-L-lysine), poly(4-hydroxy-L-proline ester) or combinations thereof.

[0538] In one embodiment, the diblock copolymer may include PEG in combination with a polymer such as, but not limited to, polyethylenes, polycarbonates, polyanhydrides, polyhydroxyacids, polypropylfumerates, polycaprolactones, polyamides, polyacetals, polyethers, polyesters, poly(orthoesters), polycyanoacrylates, polyvinyl alcohols, polyurethanes, polyphosphazenes, polyacrylates, polymethacrylates, polycyanoacrylates, polyureas, polystyrenes, polyamines, polylysine, poly(ethylene imine), poly(serine ester), poly(L-lactide-co-L-lysine), poly(4-hydroxy-L-proline ester) or combinations thereof.

[0539] In one embodiment, the therapeutic nanoparticle comprises a diblock copolymer. As a non-limiting example the therapeutic nanoparticle comprises a PLGA-PEG block copolymer (see US Pub. No. US20120004293 and U.S. Pat. No. 8,236,330, herein incorporated by reference in their entireties). In another non-limiting example, the therapeutic nanoparticle is a stealth nanoparticle comprising a diblock copolymer of PEG and PLA or PEG and PLGA (see U.S. Pat. No. 8,246,968, each of which is herein incorporated by reference in its entirety).

[0540] In one embodiment, the therapeutic nanoparticle may comprise at least one acrylic polymer. Acrylic polymers include but are not limited to, acrylic acid, methacrylic acid, acrylic acid and methacrylic acid copolymers, methyl methacrylate copolymers, ethoxyethyl methacrylates, cyanoethyl methacrylate, amino alkyl methacrylate copolymer, poly(acrylic acid), poly(methacrylic acid), polycyanoacrylates and combinations thereof.

[0541] In one embodiment, the therapeutic nanoparticles may comprise at least one cationic polymer described herein and/or known in the art.

[0542] In one embodiment, the therapeutic nanoparticles may comprise at least one amine-containing polymer such as, but not limited to polylysine, polyethylene imine, poly(amidoamine) dendrimers and combinations thereof.

[0543] In one embodiment, the therapeutic nanoparticles may comprise at least one degradable polyester which may contain polycationic side chains. Degradeable polyesters include, but are not limited to, poly(serine ester), poly(L-lactide-co-L-lysine), poly(4-hydroxy-L-proline ester), and combinations thereof. In another embodiment, the degradable polyesters may include a PEG conjugation to form a PEGylated polymer.

[0544] In another embodiment, the therapeutic nanoparticle may include a conjugation of at least one targeting ligand.

[0545] In one embodiment, the therapeutic nanoparticle may be formulated in an aqueous solution which may be used to target cancer (see International Pub No. WO2011084513 and US Pub No. US20110294717, each of which is herein incorporated by reference in their entirety).

[0546] In one embodiment, the cell phenotype altering polynucleotides, primary constructs, or mmRNA may be encapsulated in, linked to and/or associated with synthetic nanocarriers. The synthetic nanocarriers may be formulated using methods known in the art and/or described herein. As a non-limiting example, the synthetic nanocarriers may be formulated by the methods described in International Pub Nos. WO2010005740, WO2010030763 and US Pub. Nos. US20110262491, US20100104645 and US20100087337, each of which is herein incorporated by reference in their entirety. In another embodiment, the synthetic nanocarrier formulations may be lyophilized by methods described in International Pub. No. WO2011072218 and U.S. Pat. No. 8,211,473; each of which is herein incorporated by reference in their entireties.

[0547] In one embodiment, the synthetic nanocarriers may contain reactive groups to release the cell phenotype altering polynucleotides, primary constructs and/or mmRNA described herein (see International Pub. No. WO20120952552 and US Pub No. US20120171229, each of which is herein incorporated by reference in their entirety).

[0548] In one embodiment, the synthetic nanocarriers may contain an immunostimulatory agent to enhance the immune response from delivery of the synthetic nanocarrier. As a non-limiting example, the synthetic nanocarrier may comprise a Th1 immunostimulatory agent which may enhance a Th1-based response of the immune system (see International Pub No. WO2010123569 and US Pub. No. US20110223201, each of which is herein incorporated by reference in its entirety).

[0549] In one embodiment, the synthetic nanocarriers may be formulated for targeted release. In one embodiment, the synthetic nanocarrier is formulated to release the cell phenotype altering polynucleotides, primary constructs and/or mmRNA at a specified pH and/or after a desired time interval. As a non-limiting example, the synthetic nanoparticle may be formulated to release the cell phenotype altering polynucleotides, primary constructs and/or mmRNA after 24 hours and/or at a pH of 4.5 (see International Pub. Nos. WO2010138193 and WO2010138194 and US Pub Nos. US20110020388 and US20110027217, each of which is herein incorporated by reference in their entireties).

[0550] In one embodiment, the synthetic nanocarriers may be formulated for controlled and/or sustained release of the cell phenotype altering polynucleotides, primary constructs and/or mmRNA described herein. As a non-limiting example, the synthetic nanocarriers for sustained release may be formulated by methods known in the art, described herein and/or as described in International Pub No. WO2010138192 and US Pub No. 20100303850, each of which is herein incorporated by reference in their entireties.

### Polymers, Biodegradable Nanoparticles, and Core-Shell Nanoparticles

[0551] The cell phenotype altering polynucleotide, primary construct, and mmRNA of the invention can be formulated using natural and/or synthetic polymers. Non-limiting examples of polymers which may be used for delivery include, but are not limited to, Dynamic POLYCONJUGATE™ formulations from MIRUS® Bio (Madison, Wis.) and Roche Madison (Madison, Wis.), PHASERX™ polymer formulations such as, without limitation, SMARTT POLYMER TECHNOLOGY™ (Seattle, Wash.), DMRI/DOPE, poloxamer, VAXFECTIN® adjuvant from Vical (San Diego, Calif.), chitosan, cyclodextrin from Calando Pharmaceuticals (Pasadena, Calif.), dendrimers and poly(lactic-co-glycolic acid) (PLGA) polymers. RONDEL™ (RNAi/Oligonucleotide Nanoparticle Delivery) polymers (Arrowhead Research Corporation, Pasadena, Calif.) and pH responsive co-block polymers such as, but not limited to, PHASERX™ (Seattle, Wash.).

[0552] A non-limiting example of PLGA formulations include, but are not limited to, PLGA injectable depots (e.g., ELIGARD® which is formed by dissolving PLGA in 66% N-methyl-2-pyrrolidone (NMP) and the remainder being aqueous solvent and leuprolide. Once injected, the PLGA and leuprolide peptide precipitates into the subcutaneous space).

[0553] Many of these polymer approaches have demonstrated efficacy in delivering oligonucleotides in vivo into the cell cytoplasm (reviewed in deFougerolles Hum Gene Ther. 2008 19:125-132; herein incorporated by reference in its entirety). Two polymer approaches that have yielded robust in vivo delivery of nucleic acids, in this case with small interfering RNA (siRNA), are dynamic polyconjugates and cyclodextrin-based nanoparticles. The first of these delivery approaches uses dynamic polyconjugates and has been shown in vivo in mice to effectively deliver siRNA and silence endogenous target mRNA in hepatocytes (Rozema et al., Proc Natl Acad Sci USA. 2007 104:12982-12887). This particular approach is a multicomponent polymer system whose key features include a membrane-active polymer to which nucleic acid, in this case siRNA, is covalently coupled via a disulfide bond and where both PEG (for charge masking) and N-acetylgalactosamine (for hepatocyte targeting) groups are linked via pH-sensitive bonds (Rozema et al., Proc Natl Acad Sci USA. 2007 104:12982-12887). On binding to the hepatocyte and entry into the endosome, the polymer complex disassembles in the low-pH environment, with the polymer exposing its positive charge, leading to endosomal escape and cytoplasmic release of the siRNA from the polymer. Through replacement of the N-acetylgalactosamine group with a mannose group, it was shown one could alter targeting from asialoglycoprotein receptor-expressing hepatocytes to sinusoidal endothelium and Kupffer cells. Another polymer approach involves using transferrin-targeted cyclodextrin-containing polycation nanoparticles. These nanoparticles have demonstrated targeted silencing of the EWS-FLII gene product in transferrin receptor-expressing Ewing's sarcoma tumor cells (Hu-Lieskovan et al., Cancer Res. 2005 65: 8984-8982) and siRNA formulated in these nanoparticles was well tolerated in non-human primates (Heidel et al., Proc Natl Acad Sci USA 2007 104:5715-21). Both of these delivery strategies incorporate rational approaches using both targeted delivery and endosomal escape mechanisms.

[0554] The polymer formulation can permit the sustained or delayed release of the cell phenotype altering polynucleotide, primary construct, or mmRNA (e.g., following intramuscular or subcutaneous injection). The altered release profile for the cell phenotype altering polynucleotide, primary construct, or mmRNA can result in, for example, translation of an encoded protein over an extended period of time. The polymer formulation may also be used to increase the stability of the cell phenotype altering polynucleotide, primary construct, or mmRNA. Biodegradable polymers have been previously used to protect nucleic acids other than mmRNA from degradation and been shown to result in sustained release of payloads in vivo (Rozema et al., Proc Natl Acad Sci USA. 2007 104:12982-12887; Sullivan et al., Expert Opin Drug Deliv. 2010 7:1433-1446; Convertine et al., Biomacromolecules. 2010 Oct. 1; Chu et al., Acc Chem Res. 2012 Jan. 13; Manganiello et al., Biomaterials. 2012 33:2301-2309; Benoit et al., Biomacromolecules. 2011 12:2708-2714; Singha et al., Nucleic Acid Ther. 2011 2:133-147; deFougerolles Hum Gene Ther. 2008 19:125-132; Schaffert and Wagner, Gene Ther. 2008 16:1131-1138; Chaturvedi et al., Expert Opin Drug Deliv. 2011 8:1455-1468; Davis, Mol Pharm. 2009 6:659-668; Davis, Nature 2010 464:1067-1070; each of which is herein incorporated by reference in its entirety).

[0555] In one embodiment, the pharmaceutical compositions may be sustained release formulations. In a further embodiment, the sustained release formulations may be for subcutaneous delivery. Sustained release formulations may include, but are not limited to, PLGA microspheres, ethylene vinyl acetate (EVAc), poloxamer, GELSITE® (Nanotherapeutics, Inc. Alachua, Fla.), HYLENEX® (Halozyme Therapeutics, San Diego Calif.), surgical sealants such as fibrinogen polymers (Ethicon Inc. Cornelia, Ga.), TISSELL® (Baxter International, Inc Deerfield, Ill.), PEG-based sealants, and COSEAL® (Baxter International, Inc Deerfield, Ill.).

[0556] As a non-limiting example modified mRNA may be formulated in PLGA microspheres by preparing the PLGA microspheres with tunable release rates (e.g., days and weeks) and encapsulating the modified mRNA in the PLGA microspheres while maintaining the integrity of the modified mRNA during the encapsulation process. EVAc are non-biodegradable, biocompatible polymers which are used extensively in pre-clinical sustained release implant applications (e.g., extended release products Ocusert a pilocarpine ophthalmic insert for glaucoma or progestasert a sustained release progesterone intrauterine device; transdermal delivery systems Testoderm, Duragesic and Selegiline; catheters). Poloxamer F-407 NF is a hydrophilic, non-ionic surfactant triblock copolymer of polyoxyethylene-polyoxypropylene-polyoxyethylene having a low viscosity at temperatures less than 5° C. and forms a solid gel at temperatures greater than 15° C. PEG-based surgical sealants comprise two synthetic PEG components mixed in a delivery device which can be prepared in one minute, seals in 3 minutes and is reabsorbed within 30 days. GELSITE® and natural polymers are capable of in-situ gelation at the site of administration. They have been shown to interact with protein and peptide therapeutic candidates through ionic ineraction to provide a stabilizing effect.

[0557] Polymer formulations can also be selectively targeted through expression of different ligands as exemplified by, but not limited by, folate, transferrin, and N-acetylgalactosamine (GalNAc) (Benoit et al., Biomacromolecules. 2011 12:2708-2714; Rozema et al., Proc Natl Acad Sci USA. 2007 104:12982-12887; Davis, Mol Pharm. 2009 6:659-668; Davis, Nature 2010 464:1067-1070; each of which is herein incorporated by reference in its entirety).

[0558] The cell phenotype altering polynucleotides, primary constructs and/or mmRNA of the invention may be formulated with or in a polymeric compound. The polymer may include at least one polymer such as, but not limited to, polyethenes, polyethylene glycol (PEG), poly(l-lysine)(PLL), PEG grafted to PLL, cationic lipopolymer, biodegradable cationic lipopolymer, polyethyleneimine (PEI), cross-linked branched poly(alkylene imines), a polyamine derivative, a modified poloxamer, a biodegradable polymer, biodegradable block copolymer, biodegradable random copolymer, biodegradable polyester copolymer, biodegradable polyester block copolymer, biodegradable polyester block random copolymer, linear biodegradable copolymer, poly[α-(4-aminobutyl)-L-glycolic acid) (PAGA), biodegradable cross-linked cationic multi-block copolymers, polycarbonates, polyanhydrides, polyhydroxyacids, polypropylfumerates, polycaprolactones, polyamides, polyacetals, polyethers, polyesters, poly(orthoesters), polycyanoacrylates, polyvinyl alcohols, polyurethanes, polyphosphazenes, polyacrylates, polymethacrylates, polycyanoacrylates, polyureas, polystyrenes, polyamines, polylysine, poly(ethylene imine), poly(serine ester), poly(L-lactide-co-L-lysine), poly(4-hydroxy-L-proline ester), acrylic polymers, amine-containing polymers or combinations thereof.

[0559] As a non-limiting example, the cell phenotype altering polynucleotides, primary constructs and/or mmRNA of the invention may be formulated with the polymeric compound of PEG grafted with PLL as described in U.S. Pat. No. 6,177,274 herein incorporated by reference in its entirety. The formulation may be used for transfecting cells in vitro or for in vivo delivery of the cell phenotype altering polynucleotides, primary constructs and/or mmRNA. In another example, the cell phenotype altering polynucleotides, primary constructs and/or mmRNA may be suspended in a solution or medium with a cationic polymer, in a dry pharmaceutical composition or in a solution that is capable of being dried as described in U.S. Pub. Nos. 20090042829 and 20090042825 each of which are herein incorporated by reference in their entireties.

[0560] As another non-limiting example the cell phenotype altering polynucleotides, primary constructs or mmRNA of the invention may be formulated with a PLGA-PEG block copolymer (see US Pub. No. US20120004293 and U.S. Pat. No. 8,236,330, each of which is herein incorporated by reference in their entireties). As a non-limiting example, the cell phenotype altering polynucleotides, primary constructs or mmRNA of the invention may be formulated with a diblock copolymer of PEG and PLA or PEG and PLGA (see U.S. Pat. No. 8,246,968, herein incorporated by reference in its entirety).

[0561] A polyamine derivative may be used to deliver nucleic acids or to treat and/or prevent a disease or to be included in an implantable or injectable device (U.S. Pub. No. 20100260817 herein incorporated by reference in its entirety). As a non-limiting example, a pharmaceutical composition may include the modified nucleic acids and mmRNA and the polyamine derivative described in U.S. Pub. No. 20100260817 (the contents of which are incorporated herein by reference in its entirety.

[0562] The cell phenotype altering polynucleotides, primary constructs or mmRNA of the invention may be formulated with at least one acrylic polymer. Acrylic polymers include but are not limited to, acrylic acid, methacrylic acid, acrylic acid and methacrylic acid copolymers, methyl methacrylate copolymers, ethoxyethyl methacrylates, cyanoethyl methacrylate, amino alkyl methacrylate copolymer, poly(acrylic acid), poly(methacrylic acid), polycyanoacrylates and combinations thereof.

[0563] In one embodiment, the cell phenotype altering polynucleotides, primary constructs or mmRNA of the present invention may be formulated with at least one polymer described in International Publication Nos. WO2011115862, WO2012082574 and WO2012068187, each of which is herein incorporated by reference in their entireties. In another embodiment the cell phenotype altering polynucleotides, primary constructs or mmRNA of the present invention may be formulated with a polymer of formula Z as described in WO2011115862, herein incorporated by reference in its entirety. In yet another embodiment, the cell phenotype altering polynucleotides, primary constructs or mmRNA may be formulated with a polymer of formula Z, Z′ or Z″ as described in WO2012082574 or WO2012068187, each of which are herein incorporated by reference in their entireties. The polymers formulated with the modified RNA of the present invention may be synthesized by the methods described in WO2012082574 or WO2012068187, each of which is herein incorporated by reference in their entireties.

[0564] Formulations of cell phenotype altering polynucleotides, primary constructs or mmRNA of the invention may include at least one amine-containing polymer such as, but not limited to polylysine, polyethylene imine, poly(amidoamine) dendrimers or combinations thereof.

[0565] For example, the cell phenotype altering polynucleotides, primary constructs and/or mmRNA of the invention may be formulated in a pharmaceutical compound including a poly(alkylene imine), a biodegradable cationic lipopolymer, a biodegradable block copolymer, a biodegradable polymer, or a biodegradable random copolymer, a biodegradable polyester block copolymer, a biodegradable polyester polymer, a biodegradable polyester random copolymer, a linear biodegradable copolymer, PAGA, a biodegradable cross-linked cationic multi-block copolymer or combinations thereof. The biodegradable cationic lipopolymer may be made my methods known in the art and/or described in U.S. Pat. No. 6,696,038, U.S. App. Nos. 20030073619 and 20040142474 each of which is herein incorporated by reference in their entireties. The poly(alkylene imine) may be made using methods known in the art and/or as described in U.S. Pub. No. 20100004315, herein incorporated by reference in its entirety. The biodegradable polymer, biodegradable block copolymer, the biodegradable random copolymer, biodegradable polyester block copolymer, biodegradable polyester polymer, or biodegradable polyester random copolymer may be made using methods known in the art and/or as described in U.S. Pat. Nos. 6,517,869 and 6,267,987, the contents of which are each incorporated herein by reference in its entirety. The linear biodegradable copolymer may be made using methods known in the art and/or as described in U.S. Pat. No. 6,652,886. The PAGA polymer may be made using methods known in the art and/or as described in U.S. Pat. No. 6,217,912 herein incorporated by reference in its entirety. The PAGA polymer may be copolymerized to form a copolymer or block copolymer with polymers such as but not limited to, poly-L-lysine, polyargine, polyornithine, histones, avidin, protamines, polylactides and poly(lactide-co-glycolides). The biodegradable cross-linked cationic multi-block copolymers may be made my methods known in the art and/or as described in U.S. Pat. No. 8,057,821 or U.S. Pub. No. 2012009145 each of which is herein incorporated by reference in their entireties. For example, the multi-block copolymers may be synthesized using linear polyethyleneimine (LPEI) blocks which have distinct patterns as compared to branched polyethyleneimines. Further, the composition or pharmaceutical composition may be made by the methods known in the art, described herein, or as described in U.S. Pub. No. 20100004315 or U.S. Pat. Nos. 6,267,987 and 6,217,912 each of which is herein incorporated by reference in their entireties.

[0566] The cell phenotype altering polynucleotides, primary constructs, and mmRNA of the invention may be formulated with at least one degradable polyester which may contain polycationic side chains. Degradeable polyesters include, but are not limited to, poly(serine ester), poly(L-lactide-co-L-lysine), poly(4-hydroxy-L-proline ester), and combinations thereof. In another embodiment, the degradable polyesters may include a PEG conjugation to form a PEGylated polymer.

[0567] In one embodiment, the polymers described herein may be conjugated to a lipid-terminating PEG. As a non-limiting example, PLGA may be conjugated to a lipid-terminating PEG forming PLGA-DSPE-PEG. As another non-limiting example, PEG conjugates for use with the present invention are described in International Publication No. WO2008103276, herein incorporated by reference in its entirety.

[0568] In one embodiment, the cell phenotype altering polynucleotides, primary constructs and/or mmRNA described herein may be conjugated with another compound. Non-limiting examples of conjugates are described in U.S. Pat. Nos. 7,964,578 and 7,833,992, each of which are herein incorporated by reference in their entireties. In another embodiment, the cell phenotype altering polynucleotides, primary constructs and/or mmRNA of the present invention may be conjugated with conjugates of formula 1-122 as described in U.S. Pat. Nos. 7,964,578 and 7,833,992, each of which are herein incorporated by reference in their entireties.

[0569] As described in U.S. Pub. No. 20100004313, herein incorporated by reference in its entirety, a gene delivery composition may include a nucleotide sequence and a poloxamer. For example, the cell phenotype altering polynucleotide, primary construct and/or mmRNA of the present invention may be used in a gene delivery composition with the poloxamer described in U.S. Pub. No. 20100004313.

[0570] In one embodiment, the polymer formulation of the present invention may be stabilized by contacting the polymer formulation, which may include a cationic carrier, with a cationic lipopolymer which may be covalently linked to cholesterol and polyethylene glycol groups. The polymer formulation may be contacted with a cationic lipopolymer using the methods described in U.S. Pub. No. 20090042829 herein incorporated by reference in its entirety. The cationic carrier may include, but is not limited to, polyethylenimine, poly(trimethylenimine), poly(tetramethylenimine), polypropylenimine, aminoglycoside-polyamine, dideoxy-diamino-b-cyclodextrin, spermine, spermidine, poly(2-dimethylamino)ethyl methacrylate, poly(lysine), poly(histidine), poly(arginine), cationized gelatin, dendrimers, chitosan, 1,2-Dioleoyl-3-Trimethylammonium-Propane(DOTAP), N-[1-(2,3-dioleoyloxy)propyl]-N,N,N-trimethylammonium chloride (DOTMA), 1-[2-(oleoyloxy)ethyl]-2-oleyl-3-(2-hydroxyethyl)imidazolinium chloride (DOTIM), 2,3-dioleyloxy-N-[2(sperminecarboxamido)ethyl]-N,N-dimethyl-1-propanaminium trifluoroacetate (DOSPA), 3B—[N—(N′,N′-Dimethylaminoethane)-carbamoyl]Cholesterol Hydrochloride (DC-Cholesterol HCl) diheptadecylamidoglycyl spermidine (DOGS), N,N-distearyl-N,N-dimethylammonium bromide (DDAB), N-(1,2-dimyristyloxyprop-3-yl)-N,N-dimethyl-N-hydroxyethyl ammonium bromide (DMRIE), N,N-dioleyl-N,N-dimethylammonium chloride DODAC) and combinations thereof.

[0571] The cell phenotype altering polynucleotide, primary construct, and mmRNA of the invention can also be formulated as a nanoparticle using a combination of polymers, lipids, and/or other biodegradable agents, such as, but not limited to, calcium phosphate. Components may be combined in a core-shell, hybrid, and/or layer-by-layer architecture, to allow for fine-tuning of the nanoparticle so to delivery of the cell phenotype altering polynucleotide, primary construct and mmRNA may be enhanced (Wang et al., Nat Mater. 2006 5:791-796; Fuller et al., Biomaterials. 2008 29:1526-1532; DeKoker et al., Adv Drug Deliv Rev. 2011 63:748-761; Endres et al., Biomaterials. 2011 32:7721-7731; Su et al., Mol Pharm. 2011 Jun. 6; 8(3):774-87; herein incorporated by reference in its entirety).

[0572] Biodegradable calcium phosphate nanoparticles in combination with lipids and/or polymers have been shown to deliver cell phenotype altering polynucleotides, primary constructs and mmRNA in vivo. In one embodiment, a lipid coated calcium phosphate nanoparticle, which may also contain a targeting ligand such as anisamide, may be used to deliver the cell phenotype altering polynucleotide, primary construct and mmRNA of the present invention. For example, to effectively deliver siRNA in a mouse metastatic lung model a lipid coated calcium phosphate nanoparticle was used (Li et al., J Contr Rel. 2010 142: 416-421; Li et al., J Contr Rel. 2012 158:108-114; Yang et al., Mol Ther. 2012 20:609-615). This delivery system combines both a targeted nanoparticle and a component to enhance the endosomal escape, calcium phosphate, in order to improve delivery of the siRNA.

[0573] In one embodiment, calcium phosphate with a PEG-polyanion block copolymer may be used to delivery cell phenotype altering polynucleotides, primary constructs and mmRNA (Kazikawa et al., J Contr Rel. 2004 97:345-356; Kazikawa et al., J Contr Rel. 2006 111:368-370).

[0574] In one embodiment, a PEG-charge-conversional polymer (Pitella et al., Biomaterials. 2011 32:3106-3114) may be used to form a nanoparticle to deliver the cell phenotype altering polynucleotides, primary constructs and mmRNA of the present invention. The PEG-charge-conversional polymer may improve upon the PEG-polyanion block copolymers by being cleaved into a polycation at acidic pH, thus enhancing endosomal escape.

[0575] The use of core-shell nanoparticles has additionally focused on a high-throughput approach to synthesize cationic cross-linked nanogel cores and various shells (Siegwart et al., Proc Natl Acad Sci USA. 2011 108:12996-13001). The complexation, delivery, and internalization of the polymeric nanoparticles can be precisely controlled by altering the chemical composition in both the core and shell components of the nanoparticle. For example, the core-shell nanoparticles may efficiently deliver siRNA to mouse hepatocytes after they covalently attach cholesterol to the nanoparticle.

[0576] In one embodiment, a hollow lipid core comprising a middle PLGA layer and an outer neutral lipid layer containing PEG may be used to delivery of the cell phenotype altering polynucleotide, primary construct and mmRNA of the present invention. As a non-limiting example, in mice bearing a luciferease-expressing tumor, it was determined that the lipid-polymer-lipid hybrid nanoparticle significantly suppressed luciferase expression, as compared to a conventional lipoplex (Shi et al, Angew Chem Int Ed. 2011 50:7027-7031).

### Peptides and Proteins

[0577] The cell phenotype altering polynucleotide, primary construct, and mmRNA of the invention can be formulated with peptides and/or proteins in order to increase transfection of cells by the cell phenotype altering polynucleotide, primary construct, or mmRNA. In one embodiment, peptides such as, but not limited to, cell penetrating peptides and proteins and peptides that enable intracellular delivery may be used to deliver pharmaceutical formulations. A non-limiting example of a cell penetrating peptide which may be used with the pharmaceutical formulations of the present invention includes a cell-penetrating peptide sequence attached to polycations that facilitates delivery to the intracellular space, e.g., HIV-derived TAT peptide, penetratins, transportans, or hCT derived cell-penetrating peptides (see, e.g., Caron et al., Mol. Ther. 3(3):310-8 (2001); Langel, Cell-Penetrating Peptides: Processes and Applications (CRC Press, Boca Raton Fla., 2002); El-Andaloussi et al., Curr. Pharm. Des. 11(28):3597-611 (2003); and Deshayes et al., Cell. Mol. Life Sci. 62(16):1839-49 (2005), all of which are incorporated herein by reference). The compositions can also be formulated to include a cell penetrating agent, e.g., liposomes, which enhance delivery of the compositions to the intracellular space. Cell phenotype altering polynucleotides, primary constructs, and mmRNA of the invention may be complexed to peptides and/or proteins such as, but not limited to, peptides and/or proteins from Aileron Therapeutics (Cambridge, Mass.) and Permeon Biologics (Cambridge, Mass.) in order to enable intracellular delivery (Cronican et al., ACS Chem. Biol. 2010 5:747-752; McNaughton et al., Proc. Natl. Acad. Sci. USA 2009 106:6111-6116; Sawyer, Chem Biol Drug Des. 2009 73:3-6; Verdine and Hilinski, Methods Enzymol. 2012; 503:3-33; all of which are herein incorporated by reference in its entirety).

[0578] In one embodiment, the cell-penetrating polypeptide may comprise a first domain and a second domain. The first domain may comprise a supercharged polypeptide. The second domain may comprise a protein-binding partner. As used herein, “protein-binding partner” includes, but are not limited to, antibodies and functional fragments thereof, scaffold proteins, or peptides. The cell-penetrating polypeptide may further comprise an intracellular binding partner for the protein-binding partner. The cell-penetrating polypeptide may be capable of being secreted from a cell where the cell phenotype altering polynucleotide, primary construct, or mmRNA may be introduced.

[0579] Formulations of the including peptides or proteins may be used to increase cell transfection by the cell phenotype altering polynucleotide, primary construct, or mmRNA, alter the biodistribution of the cell phenotype altering polynucleotide, primary construct, or mmRNA (e.g., by targeting specific tissues or cell types), and/or increase the translation of encoded protein.

### Cells

[0580] The cell phenotype altering polynucleotide, primary construct, and mmRNA of the invention can be transfected ex vivo into cells, which are subsequently transplanted into a subject. As non-limiting examples, the pharmaceutical compositions may include red blood cells to deliver modified cell phenotype altering RNA to liver and myeloid cells, virosomes to deliver modified RNA in virus-like particles (VLPs), and electroporated cells such as, but not limited to, from MAXCYTE® (Gaithersburg, Md.) and from ERYTECH® (Lyon, France) to deliver modified RNA. Examples of use of red blood cells, viral particles and electroporated cells to deliver payloads other than mmRNA have been documented (Godfrin et al., Expert Opin Biol Ther. 2012 12:127-133; Fang et al., Expert Opin Biol Ther. 2012 12:385-389; Hu et al., Proc Natl Acad Sci USA. 2011 108:10980-10985; Lund et al., Pharm Res. 2010 27:400-420; Huckriede et al., J Liposome Res. 2007; 17:39-47; Cusi, Hum Vaccin. 2006 2:1-7; de Jonge et al., Gene Ther. 2006 13:400-411; all of which are herein incorporated by reference in its entirety).

[0581] The cell phenotype altering polynucleotides, primary constructs and mmRNA may be delivered in synthetic VLPs synthesized by the methods described in International Pub No. WO2011085231 and US Pub No. 20110171248, each of which is herein incorporated by reference in their entireties.

[0582] Cell-based formulations of the cell phenotype altering polynucleotide, primary construct, and mmRNA of the invention may be used to ensure cell transfection (e.g., in the cellular carrier), alter the biodistribution of the cell phenotype altering polynucleotide, primary construct, or mmRNA (e.g., by targeting the cell carrier to specific tissues or cell types), and/or increase the translation of encoded protein.

[0583] A variety of methods are known in the art and suitable for introduction of nucleic acid into a cell, including viral and non-viral mediated techniques. Examples of typical non-viral mediated techniques include, but are not limited to, electroporation, calcium phosphate mediated transfer, nucleofection, sonoporation, heat shock, magnetofection, liposome mediated transfer, microinjection, microproj ectile mediated transfer (nanoparticles), cationic polymer mediated transfer (DEAE-dextran, polyethylenimine, polyethylene glycol (PEG) and the like) or cell fusion.

[0584] The technique of sonoporation, or cellular sonication, is the use of sound (e.g., ultrasonic frequencies) for modifying the permeability of the cell plasma membrane. Sonoporation methods are known to those in the art and are used to deliver nucleic acids in vivo (Yoon and Park, Expert Opin Drug Deliv. 2010 7:321-330; Postema and Gilja, Curr Pharm Biotechnol. 2007 8:355-361; Newman and Bettinger, Gene Ther. 2007 14:465-475; all herein incorporated by reference in their entirety). Sonoporation methods are known in the art and are also taught for example as it relates to bacteria in US Patent Publication 20100196983 and as it relates to other cell types in, for example, US Patent Publication 20100009424, each of which are incorporated herein by reference in their entirety.

[0585] Electroporation techniques are also well known in the art and are used to deliver nucleic acids in vivo and clinically (Andre et al., Curr Gene Ther. 2010 10:267-280; Chiarella et al., Curr Gene Ther. 2010 10:281-286; Hojman, Curr Gene Ther. 2010 10:128-138; all herein incorporated by reference in their entirety). In one embodiment, cell phenotype altering polynucleotides, primary constructs or mmRNA may be delivered by electroporation as described in Example 26.

### Hyaluronidase

[0586] The intramuscular or subcutaneous localized injection of cell phenotype altering polynucleotide, primary construct, or mmRNA of the invention can include hyaluronidase, which catalyzes the hydrolysis of hyaluronan. By catalyzing the hydrolysis of hyaluronan, a constituent of the interstitial barrier, hyaluronidase lowers the viscosity of hyaluronan, thereby increasing tissue permeability (Frost, Expert Opin. Drug Deliv. (2007) 4:427-440; herein incorporated by reference in its entirety). It is useful to speed their dispersion and systemic distribution of encoded proteins produced by transfected cells. Alternatively, the hyaluronidase can be used to increase the number of cells exposed to a cell phenotype altering polynucleotide, primary construct, or mmRNA of the invention administered intramuscularly or subcutaneously.

### Nanoparticle Mimics

[0587] The cell phenotype altering polynucleotide, primary construct or mmRNA of the invention may be encapsulated within and/or absorbed to a nanoparticle mimic. A nanoparticle mimic can mimic the delivery function organisms or particles such as, but not limited to, pathogens, viruses, bacteria, fungus, parasites, prions and cells. As a non-limiting example the cell phenotype altering polynucleotide, primary construct or mmRNA of the invention may be encapsulated in a non-viron particle which can mimic the delivery function of a virus (see International Pub. No. WO2012006376 herein incorporated by reference in its entirety).

### Nanotubes

[0588] The cell phenotype altering polynucleotides, primary constructs or mmRNA of the invention can be attached or otherwise bound to at least one nanotube such as, but not limited to, rosette nanotubes, rosette nanotubes having twin bases with a linker, carbon nanotubes and/or single-walled carbon nanotubes, The cell phenotype altering polynucleotides, primary constructs or mmRNA may be bound to the nanotubes through forces such as, but not limited to, steric, ionic, covalent and/or other forces.

[0589] In one embodiment, the nanotube can release one or more cell phenotype altering polynucleotides, primary constructs or mmRNA into cells. The size and/or the surface structure of at least one nanotube may be altered so as to govern the interaction of the nanotubes within the body and/or to attach or bind to the cell phenotype altering polynucleotides, primary constructs or mmRNA disclosed herein. In one embodiment, the building block and/or the functional groups attached to the building block of the at least one nanotube may be altered to adjust the dimensions and/or properties of the nanotube. As a non-limiting example, the length of the nanotubes may be altered to hinder the nanotubes from passing through the holes in the walls of normal blood vessels but still small enough to pass through the larger holes in the blood vessels of tumor tissue.

[0590] In one embodiment, at least one nanotube may also be coated with delivery enhancing compounds including polymers, such as, but not limited to, polyethylene glycol. In another embodiment, at least one nanotube and/or the cell phenotype altering polynucleotides, primary constructs or mmRNA may be mixed with pharmaceutically acceptable excipients and/or delivery vehicles.

[0591] In one embodiment, the cell phenotype altering polynucleotides, primary constructs or mmRNA are attached and/or otherwise bound to at least one rosette nanotube. The rosette nanotubes may be formed by a process known in the art and/or by the process described in International Publication No. WO2012094304, herein incorporated by reference in its entirety. At least one cell phenotype altering polynucleotide, primary construct and/or mmRNA may be attached and/or otherwise bound to at least one rosette nanotube by a process as described in International Publication No. WO2012094304, herein incorporated by reference in its entirety, where rosette nanotubes or modules forming rosette nanotubes are mixed in aqueous media with at least one cell phenotype altering polynucleotide, primary construct and/or mmRNA under conditions which may cause at least one cell phenotype altering polynucleotide, primary construct or mmRNA to attach or otherwise bind to the rosette nanotubes.

### Conjugates

[0592] The cell phenotype altering polynucleotides, primary constructs, and mmRNA of the invention include conjugates, such as a cell phenotype altering polynucleotide, primary construct, or mmRNA covalently linked to a carrier or targeting group, or including two encoding regions that together produce a fusion protein (e.g., bearing a targeting group and therapeutic protein or peptide).

[0593] The conjugates of the invention include a naturally occurring substance, such as a protein (e.g., human serum albumin (HSA), low-density lipoprotein (LDL), high-density lipoprotein (HDL), or globulin); an carbohydrate (e.g., a dextran, pullulan, chitin, chitosan, inulin, cyclodextrin or hyaluronic acid); or a lipid. The ligand may also be a recombinant or synthetic molecule, such as a synthetic polymer, e.g., a synthetic polyamino acid, an oligonucleotide (e.g. an aptamer). Examples of polyamino acids include polyamino acid is a polylysine (PLL), poly L-aspartic acid, poly L-glutamic acid, styrene-maleic acid anhydride copolymer, poly(L-lactide-co-glycolied) copolymer, divinyl ether-maleic anhydride copolymer, N-(2-hydroxypropyl)methacrylamide copolymer (HMPA), polyethylene glycol (PEG), polyvinyl alcohol (PVA), polyurethane, poly(2-ethylacryllic acid), N-isopropylacrylamide polymers, or polyphosphazine. Example of polyamines include: polyethylenimine, polylysine (PLL), spermine, spermidine, polyamine, pseudopeptide-polyamine, peptidomimetic polyamine, dendrimer polyamine, arginine, amidine, protamine, cationic lipid, cationic porphyrin, quaternary salt of a polyamine, or an alpha helical peptide.

[0594] Representative U.S. patents that teach the preparation of polynucleotide conjugates, particularly to RNA, include, but are not limited to, U.S. Pat. Nos. 4,828,979; 4,948,882; 5,218,105; 5,525,465; 5,541,313; 5,545,730; 5,552,538; 5,578,717, 5,580,731; 5,591,584; 5,109,124; 5,118,802; 5,138,045; 5,414,077; 5,486,603; 5,512,439; 5,578,718; 5,608,046; 4,587,044; 4,605,735; 4,667,025; 4,762,779; 4,789,737; 4,824,941; 4,835,263; 4,876,335; 4,904,582; 4,958,013; 5,082,830; 5,112,963; 5,214,136; 5,082,830; 5,112,963; 5,214,136; 5,245,022; 5,254,469; 5,258,506; 5,262,536; 5,272,250; 5,292,873; 5,317,098; 5,371,241, 5,391,723; 5,416,203, 5,451,463; 5,510,475; 5,512,667; 5,514,785; 5,565,552; 5,567,810; 5,574,142; 5,585,481; 5,587,371; 5,595,726; 5,597,696; 5,599,923; 5,599,928 and 5,688,941; 6,294,664; 6,320,017; 6,576,752; 6,783,931; 6,900,297; 7,037,646; each of which is herein incorporated by reference in their entireties.

[0595] In one embodiment, the conjugate of the present invention may function as a carrier for the cell phenotype altering polynucleotides, primary constructs and/or mmRNA of the present invention. The conjugate may comprise a cationic polymer such as, but not limited to, polyamine, polylysine, polyalkylenimine, and polyethylenimine which may be grafted to with poly(ethylene glycol). As a non-limiting example, the conjugate may be similar to the polymeric conjugate and the method of synthesizing the polymeric conjugate described in U.S. Pat. No. 6,586,524 herein incorporated by reference in its entirety.

[0596] The conjugates can also include targeting groups, e.g., a cell or tissue targeting agent, e.g., a lectin, glycoprotein, lipid or protein, e.g., an antibody, that binds to a specified cell type such as a kidney cell. A targeting group can be a thyrotropin, melanotropin, lectin, glycoprotein, surfactant protein A, Mucin carbohydrate, multivalent lactose, multivalent galactose, N-acetyl-galactosamine, N-acetyl-gulucosamine multivalent mannose, multivalent fucose, glycosylated polyaminoacids, multivalent galactose, transferrin, bisphosphonate, polyglutamate, polyaspartate, a lipid, cholesterol, a steroid, bile acid, folate, vitamin B12, biotin, an RGD peptide, an RGD peptide mimetic or an aptamer.

[0597] Targeting groups can be proteins, e.g., glycoproteins, or peptides, e.g., molecules having a specific affinity for a co-ligand, or antibodies e.g., an antibody, that binds to a specified cell type such as a cancer cell, endothelial cell, or bone cell. Targeting groups may also include hormones and hormone receptors. They can also include non-peptidic species, such as lipids, lectins, carbohydrates, vitamins, cofactors, multivalent lactose, multivalent galactose, N-acetyl-galactosamine, N-acetyl-gulucosamine multivalent mannose, multivalent fucose, or aptamers. The ligand can be, for example, a lipopolysaccharide, or an activator of p38 MAP kinase.

[0598] The targeting group can be any ligand that is capable of targeting a specific receptor. Examples include, without limitation, folate, GalNAc, galactose, mannose, mannose-6P, apatamers, integrin receptor ligands, chemokine receptor ligands, transferrin, biotin, serotonin receptor ligands, PSMA, endothelin, GCPII, somatostatin, LDL, and HDL ligands. In particular embodiments, the targeting group is an aptamer. The aptamer can be unmodified or have any combination of modifications disclosed herein.

[0599] In one embodiment, pharmaceutical compositions of the present invention may include chemical modifications such as, but not limited to, modifications similar to locked nucleic acids.

[0600] Representative U.S. patents that teach the preparation of locked nucleic acid (LNA) such as those from Santaris, include, but are not limited to, the following: U.S. Pat. Nos. 6,268,490; 6,670,461; 6,794,499; 6,998,484; 7,053,207; 7,084,125; and 7,399,845, each of which is herein incorporated by reference in its entirety.

[0601] Representative U.S. patents that teach the preparation of PNA compounds include, but are not limited to, U.S. Pat. Nos. 5,539,082; 5,714,331; and 5,719,262, each of which is herein incorporated by reference. Further teaching of PNA compounds can be found, for example, in Nielsen et al., Science, 1991, 254, 1497-1500.

[0602] Some embodiments featured in the invention include cell phenotype altering polynucleotides, primary constructs or mmRNA with phosphorothioate backbones and oligonucleosides with other modified backbones, and in particular —CH₂—NH—CH₂—, —CH₂—N(CH₃)—O—CH₂—[known as a methylene (methylimino) or MMI backbone], —CH₂—O—N(CH₃)—CH₂—, —CH₂—N(CH₃)—N(CH₃)—CH₂— and —N(CH₃)—CH₂—CH₂—[wherein the native phosphodiester backbone is represented as —O—P(O)₂—O—CH₂—] of the above-referenced U.S. Pat. No. 5,489,677, and the amide backbones of the above-referenced U.S. Pat. No. 5,602,240. In some embodiments, the polynucleotides featured herein have morpholino backbone structures of the above-referenced U.S. Pat. No. 5,034,506.

[0603] Modifications at the 2′ position may also aid in delivery. Preferably, modifications at the 2′ position are not located in a polypeptide-coding sequence, i.e., not in a translatable region. Modifications at the 2′ position may be located in a 5′UTR, a 3′UTR and/or a tailing region. Modifications at the 2′ position can include one of the following at the 2′ position: H (i.e., 2′-deoxy); F; O-, S-, or N-alkyl; O-, S-, or N-alkenyl; O-, S- or N-alkynyl; or O-alkyl-O-alkyl, wherein the alkyl, alkenyl and alkynyl may be substituted or unsubstituted C₁ to C₁₀ alkyl or C₂ to C₁₀ alkenyl and alkynyl. Exemplary suitable modifications include O[(CH₂)ₙO]ₘCH₃, O(CH₂)ₙOCH₃, O(CH₂)ₙNH₂, O(CH₂)ₙCH₃, O(CH₂)ₙONH₂, and O(CH₂)ₙON[(CH₂)ₙCH₃)]₂, where n and m are from 1 to about 10. In other embodiments, the cell phenotype altering polynucleotides, primary constructs or mmRNA include one of the following at the 2′ position: C₁ to C₁₀ lower alkyl, substituted lower alkyl, alkaryl, aralkyl, O-alkaryl or O-aralkyl, SH, SCH₃, OCN, Cl, Br, CN, CF₃, OCF₃, SOCH₃, SO₂CH₃, ONO₂, NO₂, N₃, NH₂, heterocycloalkyl, heterocycloalkaryl, aminoalkylamino, polyalkylamino, substituted silyl, an RNA cleaving group, a reporter group, an intercalator, a group for improving the pharmacokinetic properties, or a group for improving the pharmacodynamic properties, and other substituents having similar properties. In some embodiments, the modification includes a 2′-methoxyethoxy (2′-O—CH₂CH₂OCH₃, also known as 2′-O-(2-methoxyethyl) or 2′-MOE) (Martin et al., Helv. Chim. Acta, 1995, 78:486-504) i.e., an alkoxy-alkoxy group. Another exemplary modification is 2′-dimethylaminooxyethoxy, i.e., a O(CH₂)₂ON(CH₃)₂ group, also known as 2′-DMAOE, as described in examples herein below, and 2′-dimethylaminoethoxyethoxy (also known in the art as 2′-O-dimethylaminoethoxyethyl or 2′-DMAEOE), i.e., 2′-O—CH₂—O—CH₂—N(CH₂)₂, also described in examples herein below. Other modifications include 2′-methoxy (2′-OCH₃), 2′-aminopropoxy (2′-OCH₂CH₂CH₂NH₂) and 2′-fluoro (2′-F). Similar modifications may also be made at other positions, particularly the 3′ position of the sugar on the 3′ terminal nucleotide or in 2′-5′ linked dsRNAs and the 5′ position of 5′ terminal nucleotide. Cell phenotype altering polynucleotides of the invention may also have sugar mimetics such as cyclobutyl moieties in place of the pentofuranosyl sugar. Representative U.S. patents that teach the preparation of such modified sugar structures include, but are not limited to, U.S. Pat. Nos. 4,981,957; 5,118,800; 5,319,080; 5,359,044; 5,393,878; 5,446,137; 5,466,786; 5,514,785; 5,519,134; 5,567,811; 5,576,427; 5,591,722; 5,597,909; 5,610,300; 5,627,053; 5,639,873; 5,646,265; 5,658,873; 5,670,633; and 5,700,920 and each of which is herein incorporated by reference.

[0604] In still other embodiments, the cell phenotype altering polynucleotide, primary construct, or mmRNA is covalently conjugated to a cell penetrating polypeptide. The cell-penetrating peptide may also include a signal sequence. The conjugates of the invention can be designed to have increased stability; increased cell transfection; and/or altered the biodistribution (e.g., targeted to specific tissues or cell types).

### Self-Assembled Nucleic Acid Nanoparticles

[0605] Self-assembled nanoparticles have a well-defined size which may be precisely controlled as the nucleic acid strands may be easily reprogrammable. For example, the optimal particle size for a cancer-targeting nanodelivery carrier is 20-100 nm as a diameter greater than 20 nm avoids renal clearance and enhances delivery to certain tumors through enhanced permeability and retention effect. Using self-assembled nucleic acid nanoparticles a single uniform population in size and shape having a precisely controlled spatial orientation and density of cancer-targeting ligands for enhanced delivery. As a non-limiting example, oligonucleotide nanoparticles are prepared using programmable self-assembly of short DNA fragments and therapeutic siRNAs. These nanoparticles are molecularly identical with controllable particle size and target ligand location and density. The DNA fragments and siRNAs self-assembled into a one-step reaction to generate DNA/siRNA tetrahedral nanoparticles for targeted in vivo delivery. (Lee et al., Nature Nanotechnology 2012 7:389-393).

### Excipients

[0606] Pharmaceutical formulations may additionally comprise a pharmaceutically acceptable excipient, which, as used herein, includes any and all solvents, dispersion media, diluents, or other liquid vehicles, dispersion or suspension aids, surface active agents, isotonic agents, thickening or emulsifying agents, preservatives, solid binders, lubricants and the like, as suited to the particular dosage form desired. Remington's The Science and Practice of Pharmacy, 21^{st} Edition, A. R. Gennaro (Lippincott, Williams & Wilkins, Baltimore, Md., 2006; incorporated herein by reference) discloses various excipients used in formulating pharmaceutical compositions and known techniques for the preparation thereof. Except insofar as any conventional excipient medium is incompatible with a substance or its derivatives, such as by producing any undesirable biological effect or otherwise interacting in a deleterious manner with any other component(s) of the pharmaceutical composition, its use is contemplated to be within the scope of this invention.

[0607] In some embodiments, a pharmaceutically acceptable excipient is at least 95%, at least 96%, at least 97%, at least 98%, at least 99%, or 100% pure. In some embodiments, an excipient is approved for use in humans and for veterinary use. In some embodiments, an excipient is approved by United States Food and Drug Administration. In some embodiments, an excipient is pharmaceutical grade. In some embodiments, an excipient meets the standards of the United States Pharmacopoeia (USP), the European Pharmacopoeia (EP), the British Pharmacopoeia, and/or the International Pharmacopoeia.

[0608] Pharmaceutically acceptable excipients used in the manufacture of pharmaceutical compositions include, but are not limited to, inert diluents, dispersing and/or granulating agents, surface active agents and/or emulsifiers, disintegrating agents, binding agents, preservatives, buffering agents, lubricating agents, and/or oils. Such excipients may optionally be included in pharmaceutical compositions.

[0609] Exemplary diluents include, but are not limited to, calcium carbonate, sodium carbonate, calcium phosphate, dicalcium phosphate, calcium sulfate, calcium hydrogen phosphate, sodium phosphate lactose, sucrose, cellulose, microcrystalline cellulose, kaolin, mannitol, sorbitol, inositol, sodium chloride, dry starch, cornstarch, powdered sugar, etc., and/or combinations thereof.

[0610] Exemplary granulating and/or dispersing agents include, but are not limited to, potato starch, corn starch, tapioca starch, sodium starch glycolate, clays, alginic acid, guar gum, citrus pulp, agar, bentonite, cellulose and wood products, natural sponge, cation-exchange resins, calcium carbonate, silicates, sodium carbonate, cross-linked poly(vinyl-pyrrolidone) (crospovidone), sodium carboxymethyl starch (sodium starch glycolate), carboxymethyl cellulose, cross-linked sodium carboxymethyl cellulose (croscarmellose), methylcellulose, pregelatinized starch (starch 1500), microcrystalline starch, water insoluble starch, calcium carboxymethyl cellulose, magnesium aluminum silicate (VEEGUM®), sodium lauryl sulfate, quaternary ammonium compounds, etc., and/or combinations thereof.

[0611] Exemplary surface active agents and/or emulsifiers include, but are not limited to, natural emulsifiers (e.g. acacia, agar, alginic acid, sodium alginate, tragacanth, chondrux, cholesterol, xanthan, pectin, gelatin, egg yolk, casein, wool fat, cholesterol, wax, and lecithin), colloidal clays (e.g. bentonite [aluminum silicate] and VEEGUM® [magnesium aluminum silicate]), long chain amino acid derivatives, high molecular weight alcohols (e.g. stearyl alcohol, cetyl alcohol, oleyl alcohol, triacetin monostearate, ethylene glycol distearate, glyceryl monostearate, and propylene glycol monostearate, polyvinyl alcohol), carbomers (e.g. carboxy polymethylene, polyacrylic acid, acrylic acid polymer, and carboxyvinyl polymer), carrageenan, cellulosic derivatives (e.g. carboxymethylcellulose sodium, powdered cellulose, hydroxymethyl cellulose, hydroxypropyl cellulose, hydroxypropyl methylcellulose, methylcellulose), sorbitan fatty acid esters (e.g. polyoxyethylene sorbitan monolaurate [TWEEN®20], polyoxyethylene sorbitan [TWEENn®60], polyoxyethylene sorbitan monooleate [TWEEN®80], sorbitan monopalmitate [SPAN®40], sorbitan monostearate [Span®60], sorbitan tristearate [Span®65], glyceryl monooleate, sorbitan monooleate [SPAN®80]), polyoxyethylene esters (e.g. polyoxyethylene monostearate [MYRJ®45], polyoxyethylene hydrogenated castor oil, polyethoxylated castor oil, polyoxymethylene stearate, and SOLUTOL®), sucrose fatty acid esters, polyethylene glycol fatty acid esters (e.g. CREMOPHOR®), polyoxyethylene ethers, (e.g. polyoxyethylene lauryl ether [BRIJ®30]), poly(vinyl-pyrrolidone), diethylene glycol monolaurate, triethanolamine oleate, sodium oleate, potassium oleate, ethyl oleate, oleic acid, ethyl laurate, sodium lauryl sulfate, PLUORINC®F 68, POLOXAMER® 188, cetrimonium bromide, cetylpyridinium chloride, benzalkonium chloride, docusate sodium, etc. and/or combinations thereof.

[0612] Exemplary binding agents include, but are not limited to, starch (e.g. cornstarch and starch paste); gelatin; sugars (e.g. sucrose, glucose, dextrose, dextrin, molasses, lactose, lactitol, mannitol,); natural and synthetic gums (e.g. acacia, sodium alginate, extract of Irish moss, panwar gum, ghatti gum, mucilage of isapol husks, carboxymethylcellulose, methylcellulose, ethylcellulose, hydroxyethylcellulose, hydroxypropyl cellulose, hydroxypropyl methylcellulose, microcrystalline cellulose, cellulose acetate, poly(vinyl-pyrrolidone), magnesium aluminum silicate (Veegum®), and larch arabogalactan); alginates; polyethylene oxide; polyethylene glycol; inorganic calcium salts; silicic acid; polymethacrylates; waxes; water; alcohol; etc.; and combinations thereof.

[0613] Exemplary preservatives may include, but are not limited to, antioxidants, chelating agents, antimicrobial preservatives, antifungal preservatives, alcohol preservatives, acidic preservatives, and/or other preservatives. Exemplary antioxidants include, but are not limited to, alpha tocopherol, ascorbic acid, acorbyl palmitate, butylated hydroxyanisole, butylated hydroxytoluene, monothioglycerol, potassium metabisulfite, propionic acid, propyl gallate, sodium ascorbate, sodium bisulfite, sodium metabisulfite, and/or sodium sulfite. Exemplary chelating agents include ethylenediaminetetraacetic acid (EDTA), citric acid monohydrate, disodium edetate, dipotassium edetate, edetic acid, fumaric acid, malic acid, phosphoric acid, sodium edetate, tartaric acid, and/or trisodium edetate. Exemplary antimicrobial preservatives include, but are not limited to, benzalkonium chloride, benzethonium chloride, benzyl alcohol, bronopol, cetrimide, cetylpyridinium chloride, chlorhexidine, chlorobutanol, chlorocresol, chloroxylenol, cresol, ethyl alcohol, glycerin, hexetidine, imidurea, phenol, phenoxyethanol, phenylethyl alcohol, phenylmercuric nitrate, propylene glycol, and/or thimerosal. Exemplary antifungal preservatives include, but are not limited to, butyl paraben, methyl paraben, ethyl paraben, propyl paraben, benzoic acid, hydroxybenzoic acid, potassium benzoate, potassium sorbate, sodium benzoate, sodium propionate, and/or sorbic acid. Exemplary alcohol preservatives include, but are not limited to, ethanol, polyethylene glycol, phenol, phenolic compounds, bisphenol, chlorobutanol, hydroxybenzoate, and/or phenylethyl alcohol. Exemplary acidic preservatives include, but are not limited to, vitamin A, vitamin C, vitamin E, beta-carotene, citric acid, acetic acid, dehydroacetic acid, ascorbic acid, sorbic acid, and/or phytic acid. Other preservatives include, but are not limited to, tocopherol, tocopherol acetate, deteroxime mesylate, cetrimide, butylated hydroxyanisol (BHA), butylated hydroxytoluened (BHT), ethylenediamine, sodium lauryl sulfate (SLS), sodium lauryl ether sulfate (SLES), sodium bisulfite, sodium metabisulfite, potassium sulfite, potassium metabisulfite, GLYDANT PLUS®, PHENONIP, methylparaben, GERMALL 115, GERMABEN®II, NEOLONE™, KATHON™, and/or EUXYL®.

[0614] Exemplary buffering agents include, but are not limited to, citrate buffer solutions, acetate buffer solutions, phosphate buffer solutions, ammonium chloride, calcium carbonate, calcium chloride, calcium citrate, calcium glubionate, calcium gluceptate, calcium gluconate, D-gluconic acid, calcium glycerophosphate, calcium lactate, propanoic acid, calcium levulinate, pentanoic acid, dibasic calcium phosphate, phosphoric acid, tribasic calcium phosphate, calcium hydroxide phosphate, potassium acetate, potassium chloride, potassium gluconate, potassium mixtures, dibasic potassium phosphate, monobasic potassium phosphate, potassium phosphate mixtures, sodium acetate, sodium bicarbonate, sodium chloride, sodium citrate, sodium lactate, dibasic sodium phosphate, monobasic sodium phosphate, sodium phosphate mixtures, tromethamine, magnesium hydroxide, aluminum hydroxide, alginic acid, pyrogen-free water, isotonic saline, Ringer's solution, ethyl alcohol, etc., and/or combinations thereof.

[0615] Exemplary lubricating agents include, but are not limited to, magnesium stearate, calcium stearate, stearic acid, silica, talc, malt, glyceryl behanate, hydrogenated vegetable oils, polyethylene glycol, sodium benzoate, sodium acetate, sodium chloride, leucine, magnesium lauryl sulfate, sodium lauryl sulfate, etc., and combinations thereof.

[0616] Exemplary oils include, but are not limited to, almond, apricot kernel, avocado, babassu, bergamot, black current seed, borage, cade, camomile, canola, caraway, carnauba, castor, cinnamon, cocoa butter, coconut, cod liver, coffee, corn, cotton seed, emu, eucalyptus, evening primrose, fish, flaxseed, geraniol, gourd, grape seed, hazel nut, hyssop, isopropyl myristate, jojoba, kukui nut, lavandin, lavender, lemon, litsea cubeba, macademia nut, mallow, mango seed, meadowfoam seed, mink, nutmeg, olive, orange, orange roughy, palm, palm kernel, peach kernel, peanut, poppy seed, pumpkin seed, rapeseed, rice bran, rosemary, safflower, sandalwood, sasquana, savoury, sea buckthorn, sesame, shea butter, silicone, soybean, sunflower, tea tree, thistle, tsubaki, vetiver, walnut, and wheat germ oils. Exemplary oils include, but are not limited to, butyl stearate, caprylic triglyceride, capric triglyceride, cyclomethicone, diethyl sebacate, dimethicone 360, isopropyl myristate, mineral oil, octyldodecanol, oleyl alcohol, silicone oil, and/or combinations thereof.

[0617] Excipients such as cocoa butter and suppository waxes, coloring agents, coating agents, sweetening, flavoring, and/or perfuming agents can be present in the composition, according to the judgment of the formulator.

### Delivery

[0618] The present disclosure encompasses the delivery of cell phenotype altering polynucleotides, primary constructs or mmRNA for any of therapeutic, pharmaceutical, diagnostic or imaging by any appropriate route taking into consideration likely advances in the sciences of drug delivery. Delivery may be naked or formulated.

### Naked Delivery

[0619] The cell phenotype altering polynucleotides, primary constructs or mmRNA of the present invention may be delivered to a cell naked. As used herein in, “naked” refers to delivering cell phenotype altering polynucleotides, primary constructs or mmRNA free from agents which promote transfection. For example, the cell phenotype altering polynucleotides, primary constructs or mmRNA delivered to the cell may contain no modifications. The naked cell phenotype altering polynucleotides, primary constructs or mmRNA may be delivered to the cell using routes of administration known in the art and described herein.

### Formulated Delivery

[0620] The cell phenotype altering polynucleotides, primary constructs or mmRNA of the present invention may be formulated, using the methods described herein. The formulations may contain cell phenotype altering polynucleotides, primary constructs or mmRNA which may be modified and/or unmodified. The formulations may further include, but are not limited to, cell penetration agents, a pharmaceutically acceptable carrier, a delivery agent, a bioerodible or biocompatible polymer, a solvent, and a sustained-release delivery depot. The formulated cell phenotype altering polynucleotides, primary constructs or mmRNA may be delivered to the cell using routes of administration known in the art and described herein.

[0621] The compositions may also be formulated for direct delivery to an organ or tissue in any of several ways in the art including, but not limited to, direct soaking or bathing, via a catheter, by gels, powder, ointments, creams, gels, lotions, and/or drops, by using substrates such as fabric or biodegradable materials coated or impregnated with the compositions, and the like.

### Administration

[0622] The cell phenotype altering polynucleotides, primary constructs or mmRNA of the present invention may be administered by any route which results in a therapeutically effective outcome. These include, but are not limited to enteral, gastroenteral, epidural, oral, transdermal, epidural (peridural), intracerebral (into the cerebrum), intracerebroventricular (into the cerebral ventricles), epicutaneous (application onto the skin), intradermal, (into the skin itself), subcutaneous (under the skin), nasal administration (through the nose), intravenous (into a vein), intraarterial (into an artery), intramuscular (into a muscle), intracardiac (into the heart), intraosseous infusion (into the bone marrow), intrathecal (into the spinal canal), intraperitoneal, (infusion or injection into the peritoneum), intravesical infusion, intravitreal, (through the eye), intracavernous injection, (into the base of the penis), intravaginal administration, intrauterine, extra-amniotic administration, transdermal (diffusion through the intact skin for systemic distribution), transmucosal (diffusion through a mucous membrane), insufflation (snorting), sublingual, sublabial, enema, eye drops (onto the conjunctiva), or in ear drops. In specific embodiments, compositions may be administered in a way which allows them cross the blood-brain barrier, vascular barrier, or other epithelial barrier. Non-limiting routes of administration for the cell phenotype altering polynucleotides, primary constructs or mmRNA of the present invention are described below.

### Parenteral and Injectible Administration

[0623] Liquid dosage forms for oral and parenteral administration include, but are not limited to, pharmaceutically acceptable emulsions, microemulsions, solutions, suspensions, syrups, and/or elixirs. In addition to active ingredients, liquid dosage forms may comprise inert diluents commonly used in the art such as, for example, water or other solvents, solubilizing agents and emulsifiers such as ethyl alcohol, isopropyl alcohol, ethyl carbonate, ethyl acetate, benzyl alcohol, benzyl benzoate, propylene glycol, 1,3-butylene glycol, dimethylformamide, oils (in particular, cottonseed, groundnut, corn, germ, olive, castor, and sesame oils), glycerol, tetrahydrofurfuryl alcohol, polyethylene glycols and fatty acid esters of sorbitan, and mixtures thereof. Besides inert diluents, oral compositions can include adjuvants such as wetting agents, emulsifying and suspending agents, sweetening, flavoring, and/or perfuming agents. In certain embodiments for parenteral administration, compositions are mixed with solubilizing agents such as CREMOPHOR®, alcohols, oils, modified oils, glycols, polysorbates, cyclodextrins, polymers, and/or combinations thereof.

[0624] Injectable preparations, for example, sterile injectable aqueous or oleaginous suspensions may be formulated according to the known art using suitable dispersing agents, wetting agents, and/or suspending agents. Sterile injectable preparations may be sterile injectable solutions, suspensions, and/or emulsions in nontoxic parenterally acceptable diluents and/or solvents, for example, as a solution in 1,3-butanediol. Among the acceptable vehicles and solvents that may be employed are water, Ringer's solution, U.S.P., and isotonic sodium chloride solution. Sterile, fixed oils are conventionally employed as a solvent or suspending medium. For this purpose any bland fixed oil can be employed including synthetic mono- or diglycerides. Fatty acids such as oleic acid can be used in the preparation of injectables.

[0625] Injectable formulations can be sterilized, for example, by filtration through a bacterial-retaining filter, and/or by incorporating sterilizing agents in the form of sterile solid compositions which can be dissolved or dispersed in sterile water or other sterile injectable medium prior to use.

[0626] In order to prolong the effect of an active ingredient, it is often desirable to slow the absorption of the active ingredient from subcutaneous or intramuscular injection. This may be accomplished by the use of a liquid suspension of crystalline or amorphous material with poor water solubility. The rate of absorption of the drug then depends upon its rate of dissolution which, in turn, may depend upon crystal size and crystalline form. Alternatively, delayed absorption of a parenterally administered drug form is accomplished by dissolving or suspending the drug in an oil vehicle. Injectable depot forms are made by forming microencapsule matrices of the drug in biodegradable polymers such as polylactide-polyglycolide. Depending upon the ratio of drug to polymer and the nature of the particular polymer employed, the rate of drug release can be controlled. Examples of other biodegradable polymers include poly(orthoesters) and poly(anhydrides). Depot injectable formulations are prepared by entrapping the drug in liposomes or microemulsions which are compatible with body tissues.

### Rectal and Vaginal Administration

[0627] Compositions for rectal or vaginal administration are typically suppositories which can be prepared by mixing compositions with suitable non-irritating excipients such as cocoa butter, polyethylene glycol or a suppository wax which are solid at ambient temperature but liquid at body temperature and therefore melt in the rectum or vaginal cavity and release the active ingredient.

### Oral Administration

[0628] Solid dosage forms for oral administration include capsules, tablets, pills, powders, and granules. In such solid dosage forms, an active ingredient is mixed with at least one inert, pharmaceutically acceptable excipient such as sodium citrate or dicalcium phosphate and/or fillers or extenders (e.g. starches, lactose, sucrose, glucose, mannitol, and silicic acid), binders (e.g. carboxymethylcellulose, alginates, gelatin, polyvinylpyrrolidinone, sucrose, and acacia), humectants (e.g. glycerol), disintegrating agents (e.g. agar, calcium carbonate, potato or tapioca starch, alginic acid, certain silicates, and sodium carbonate), solution retarding agents (e.g. paraffin), absorption accelerators (e.g. quaternary ammonium compounds), wetting agents (e.g. cetyl alcohol and glycerol monostearate), absorbents (e.g. kaolin and bentonite clay), and lubricants (e.g. talc, calcium stearate, magnesium stearate, solid polyethylene glycols, sodium lauryl sulfate), and mixtures thereof. In the case of capsules, tablets and pills, the dosage form may comprise buffering agents.

### Topical or Transdermal Administration

[0629] As described herein, compositions containing the cell phenotype altering polynucleotides, primary constructs or mmRNA of the invention may be formulated for administration topically. The skin may be an ideal target site for delivery as it is readily accessible. Gene expression may be restricted not only to the skin, potentially avoiding nonspecific toxicity, but also to specific layers and cell types within the skin.

[0630] The site of cutaneous expression of the delivered compositions will depend on the route of nucleic acid delivery. Three routes are commonly considered to deliver cell phenotype altering polynucleotides, primary constructs or mmRNA to the skin: (i) topical application (e.g. for local/regional treatment and/or cosmetic applications); (ii) intradermal injection (e.g. for local/regional treatment and/or cosmetic applications); and (iii) systemic delivery (e.g. for treatment of dermatologic diseases that affect both cutaneous and extracutaneous regions). Cell phenotype altering polynucleotides, primary constructs or mmRNA can be delivered to the skin by several different approaches known in the art. Most topical delivery approaches have been shown to work for delivery of DNA, such as but not limited to, topical application of non-cationic liposome—DNA complex, cationic liposome—DNA complex, particle-mediated (gene gun), puncture-mediated gene transfections, and viral delivery approaches. After delivery of the nucleic acid, gene products have been detected in a number of different skin cell types, including, but not limited to, basal keratinocytes, sebaceous gland cells, dermal fibroblasts and dermal macrophages.

[0631] In one embodiment, the invention provides for a variety of dressings (e.g., wound dressings) or bandages (e.g., adhesive bandages) for conveniently and/or effectively carrying out methods of the present invention. Typically dressing or bandages may comprise sufficient amounts of pharmaceutical compositions and/or cell phenotype altering polynucleotides, primary constructs or mmRNA described herein to allow a user to perform multiple treatments of a subject(s).

[0632] In one embodiment, the invention provides for the cell phenotype altering polynucleotides, primary constructs or mmRNA compositions to be delivered in more than one injection.

[0633] In one embodiment, before topical and/or transdermal administration at least one area of tissue, such as skin, may be subjected to a device and/or solution which may increase permeability. In one embodiment, the tissue may be subjected to an abrasion device to increase the permeability of the skin (see U.S. Patent Publication No. 20080275468, herein incorporated by reference in its entirety). In another embodiment, the tissue may be subjected to an ultrasound enhancement device. An ultrasound enhancement device may include, but is not limited to, the devices described in U.S. Publication No. 20040236268 and U.S. Pat. Nos. 6,491,657 and 6,234,990; each of which is herein incorporated by reference in their entireties. Methods of enhancing the permeability of tissue are described in U.S. Publication Nos. 20040171980 and 20040236268 and U.S. Pat. No. 6,190,315; each of whish are herein incorporated by reference in their entireties.

[0634] In one embodiment, a device may be used to increase permeability of tissue before delivering formulations of the cell phenotype altering polynucleotides, primary constructs and mmRNA described herein. The permeability of skin may be measured by methods known in the art and/or described in U.S. Pat. No. 6,190,315, herein incorporated by reference in its entirety. As a non-limiting example, a modified cell phenotype altering mRNA formulation may be delivered by the drug delivery methods described in U.S. Pat. No. 6,190,315, herein incorporated by reference in its entirety.

[0635] In another non-limiting example tissue may be treated with a eutectic mixture of local anesthetics (EMLA) cream before, during and/or after the tissue may be subjected to a device which may increase permeability. Katz et al. (Anesth Analg (2004); 98:371-76; herein incorporated by reference in its entirety) showed that using the EMLA cream in combination with a low energy, an onset of superficial cutaneous analgesia was seen as fast as 5 minutes after a pretreatment with a low energy ultrasound.

[0636] In one embodiment, enhancers may be applied to the tissue before, during, and/or after the tissue has been treated to increase permeability. Enhancers include, but are not limited to, transport enhancers, physical enhancers, and cavitation enhancers. Non-limiting examples of enhancers are described in U.S. Pat. No. 6,190,315, herein incorporated by reference in its entirety.

[0637] In one embodiment, a device may be used to increase permeability of tissue before delivering formulations of cell phenotype altering polynucleotides, primary constructs and/or mmRNA described herein, which may further contain a substance that invokes an immune response. In another non-limiting example, a formulation containing a substance to invoke an immune response may be delivered by the methods described in U.S. Publication Nos. 20040171980 and 20040236268; each of which is herein incorporated by reference in their entirety.

[0638] Dosage forms for topical and/or transdermal administration of a composition may include ointments, pastes, creams, lotions, gels, powders, solutions, sprays, inhalants and/or patches. Generally, an active ingredient is admixed under sterile conditions with a pharmaceutically acceptable excipient and/or any needed preservatives and/or buffers as may be required.

[0639] Additionally, the present invention contemplates the use of transdermal patches, which often have the added advantage of providing controlled delivery of a compound to the body. Such dosage forms may be prepared, for example, by dissolving and/or dispensing the compound in the proper medium. Alternatively or additionally, rate may be controlled by either providing a rate controlling membrane and/or by dispersing the compound in a polymer matrix and/or gel.

[0640] Formulations suitable for topical administration include, but are not limited to, liquid and/or semi liquid preparations such as liniments, lotions, oil in water and/or water in oil emulsions such as creams, ointments and/or pastes, and/or solutions and/or suspensions. Topically-administrable formulations may, for example, comprise from about 0.1% to about 10% (w/w) active ingredient, although the concentration of active ingredient may be as high as the solubility limit of the active ingredient in the solvent. Formulations for topical administration may further comprise one or more of the additional ingredients described herein.

### Depot Administration

[0641] As described herein, in some embodiments, the composition is formulated in depots for extended release. Generally, a specific organ or tissue (a “target tissue”) is targeted for administration.

[0642] In some aspects of the invention, the cell phenotype altering polynucleotides, primary constructs or mmRNA are spatially retained within or proximal to a target tissue. Provided are method of providing a composition to a target tissue of a mammalian subject by contacting the target tissue (which contains one or more target cells) with the composition under conditions such that the composition, in particular the nucleic acid component(s) of the composition, is substantially retained in the target tissue, meaning that at least 10, 20, 30, 40, 50, 60, 70, 80, 85, 90, 95, 96, 97, 98, 99, 99.9, 99.99 or greater than 99.99% of the composition is retained in the target tissue. Advantageously, retention is determined by measuring the amount of the nucleic acid present in the composition that enters one or more target cells. For example, at least 1, 5, 10, 20, 30, 40, 50, 60, 70, 80, 85, 90, 95, 96, 97, 98, 99, 99.9, 99.99 or greater than 99.99% of the nucleic acids administered to the subject are present intracellularly at a period of time following administration. For example, intramuscular injection to a mammalian subject is performed using an aqueous composition containing a ribonucleic acid and a transfection reagent, and retention of the composition is determined by measuring the amount of the ribonucleic acid present in the muscle cells.

[0643] Aspects of the invention are directed to methods of providing a composition to a target tissue of a mammalian subject, by contacting the target tissue (containing one or more target cells) with the composition under conditions such that the composition is substantially retained in the target tissue. The composition contains an effective amount of a cell phenotype altering polynucleotide, primary construct or mmRNA such that the cell phenotype altering polypeptide of interest is produced in at least one target cell. The compositions generally contain a cell penetration agent, although “naked” nucleic acid (such as nucleic acids without a cell penetration agent or other agent) is also contemplated, and a pharmaceutically acceptable carrier.

[0644] In some circumstances, the amount of a protein produced by cells in a tissue is desirably increased. Preferably, this increase in protein production is spatially restricted to cells within the target tissue. Thus, provided are methods of increasing production of a protein of interest in a tissue of a mammalian subject. A composition is provided that contains cell phenotype altering polynucleotides, primary constructs or mmRNA characterized in that a unit quantity of composition has been determined to produce the cell phenotype altering polypeptide of interest in a substantial percentage of cells contained within a predetermined volume of the target tissue.

[0645] In some embodiments, the composition includes a plurality of different cell phenotype altering polynucleotides, primary constructs or mmRNA, where one or more than one of the cell phenotype altering polynucleotides, primary constructs or mmRNA encodes a polypeptide of interest. Optionally, the composition also contains a cell penetration agent to assist in the intracellular delivery of the composition. A determination is made of the dose of the composition required to produce the polypeptide of interest in a substantial percentage of cells contained within the predetermined volume of the target tissue (generally, without inducing significant production of the cell phenotype altering polypeptide of interest in tissue adjacent to the predetermined volume, or distally to the target tissue). Subsequent to this determination, the determined dose is introduced directly into the tissue of the mammalian subject.

[0646] In one embodiment, the invention provides for the cell phenotype altering polynucleotides, primary constructs or mmRNA to be delivered in more than one injection or by split dose injections.

[0647] In one embodiment, the invention may be retained near target tissue using a small disposable drug reservoir or patch pump. Non-limiting examples of patch pumps include those manufactured and/or sold by BD® (Franklin Lakes, N.J.), Insulet Corporation (Bedford, Mass.), SteadyMed Therapeutics (San Francisco, Calif.), Medtronic (Minneapolis, Minn.), UniLife (York, Pa.), Valeritas (Bridgewater, N.J.), and SpringLeaf Therapeutics (Boston, Mass.).

### Pulmonary Administration

[0648] A pharmaceutical composition may be prepared, packaged, and/or sold in a formulation suitable for pulmonary administration via the buccal cavity. Such a formulation may comprise dry particles which comprise the active ingredient and which have a diameter in the range from about 0.5 nm to about 7 nm or from about 1 nm to about 6 nm. Such compositions are suitably in the form of dry powders for administration using a device comprising a dry powder reservoir to which a stream of propellant may be directed to disperse the powder and/or using a self propelling solvent/powder dispensing container such as a device comprising the active ingredient dissolved and/or suspended in a low-boiling propellant in a sealed container. Such powders comprise particles wherein at least 98% of the particles by weight have a diameter greater than 0.5 nm and at least 95% of the particles by number have a diameter less than 7 nm. Alternatively, at least 95% of the particles by weight have a diameter greater than 1 nm and at least 90% of the particles by number have a diameter less than 6 nm. Dry powder compositions may include a solid fine powder diluent such as sugar and are conveniently provided in a unit dose form.

[0649] Low boiling propellants generally include liquid propellants having a boiling point of below 65° F. at atmospheric pressure. Generally the propellant may constitute 50% to 99.9% (w/w) of the composition, and active ingredient may constitute 0.1% to 20% (w/w) of the composition. A propellant may further comprise additional ingredients such as a liquid non-ionic and/or solid anionic surfactant and/or a solid diluent (which may have a particle size of the same order as particles comprising the active ingredient).

[0650] Pharmaceutical compositions formulated for pulmonary delivery may provide an active ingredient in the form of droplets of a solution and/or suspension. Such formulations may be prepared, packaged, and/or sold as aqueous and/or dilute alcoholic solutions and/or suspensions, optionally sterile, comprising active ingredient, and may conveniently be administered using any nebulization and/or atomization device. Such formulations may further comprise one or more additional ingredients including, but not limited to, a flavoring agent such as saccharin sodium, a volatile oil, a buffering agent, a surface active agent, and/or a preservative such as methylhydroxybenzoate. Droplets provided by this route of administration may have an average diameter in the range from about 0.1 nm to about 200 nm.

### Intranasal, Nasal and Buccal Administration

[0651] Formulations described herein as being useful for pulmonary delivery are useful for intranasal delivery of a pharmaceutical composition. Another formulation suitable for intranasal administration is a coarse powder comprising the active ingredient and having an average particle from about 0.2 μm to 500 μm. Such a formulation is administered in the manner in which snuff is taken, i.e. by rapid inhalation through the nasal passage from a container of the powder held close to the nose.

[0652] Formulations suitable for nasal administration may, for example, comprise from about as little as 0.1% (w/w) and as much as 100% (w/w) of active ingredient, and may comprise one or more of the additional ingredients described herein. A pharmaceutical composition may be prepared, packaged, and/or sold in a formulation suitable for buccal administration. Such formulations may, for example, be in the form of tablets and/or lozenges made using conventional methods, and may, for example, 0.1% to 20% (w/w) active ingredient, the balance comprising an orally dissolvable and/or degradable composition and, optionally, one or more of the additional ingredients described herein. Alternately, formulations suitable for buccal administration may comprise a powder and/or an aerosolized and/or atomized solution and/or suspension comprising active ingredient. Such powdered, aerosolized, and/or aerosolized formulations, when dispersed, may have an average particle and/or droplet size in the range from about 0.1 nm to about 200 nm, and may further comprise one or more of any additional ingredients described herein.

### Ophthalmic Administration

[0653] A pharmaceutical composition may be prepared, packaged, and/or sold in a formulation suitable for ophthalmic administration. Such formulations may, for example, be in the form of eye drops including, for example, a 0.1/1.0% (w/w) solution and/or suspension of the active ingredient in an aqueous or oily liquid excipient. Such drops may further comprise buffering agents, salts, and/or one or more other of any additional ingredients described herein. Other ophthalmically-administrable formulations which are useful include those which comprise the active ingredient in microcrystalline form and/or in a liposomal preparation. Ear drops and/or eye drops are contemplated as being within the scope of this invention.

### Payload Administration: Detectable Agents and Therapeutic Agents

[0654] The cell phenotype altering polynucleotides, primary constructs or mmRNA described herein can be used in a number of different scenarios in which delivery of a substance (the “payload”) to a biological target is desired, for example delivery of detectable substances for detection of the target, or delivery of a therapeutic agent. Detection methods can include, but are not limited to, both imaging in vitro and in vivo imaging methods, e.g., immunohistochemistry, bioluminescence imaging (BLI), Magnetic Resonance Imaging (MRI), positron emission tomography (PET), electron microscopy, X-ray computed tomography, Raman imaging, optical coherence tomography, absorption imaging, thermal imaging, fluorescence reflectance imaging, fluorescence microscopy, fluorescence molecular tomographic imaging, nuclear magnetic resonance imaging, X-ray imaging, ultrasound imaging, photoacoustic imaging, lab assays, or in any situation where tagging/staining/imaging is required.

[0655] The cell phenotype altering polynucleotides, primary constructs or mmRNA can be designed to include both a linker and a payload in any useful orientation. For example, a linker having two ends is used to attach one end to the payload and the other end to the nucleobase, such as at the C-7 or C-8 positions of the deaza-adenosine or deaza-guanosine or to the N-3 or C-5 positions of cytosine or uracil. The cell phenotype altering polynucleotide of the invention can include more than one payload (e.g., a label and a transcription inhibitor), as well as a cleavable linker. In one embodiment, the modified nucleotide is a modified 7-deaza-adenosine triphosphate, where one end of a cleavable linker is attached to the C7 position of 7-deaza-adenine, the other end of the linker is attached to an inhibitor (e.g., to the C5 position of the nucleobase on a cytidine), and a label (e.g., Cy5) is attached to the center of the linker (see, e.g., compound 1 of A*pCp C5 Parg Capless in FIG. 5 and columns 9 and 10 of U.S. Pat. No. 7,994,304, incorporated herein by reference). Upon incorporation of the modified 7-deaza-adenosine triphosphate to an encoding region, the resulting cell phenotype altering polynucleotide will have a cleavable linker attached to a label and an inhibitor (e.g., a polymerase inhibitor). Upon cleavage of the linker (e.g., with reductive conditions to reduce a linker having a cleavable disulfide moiety), the label and inhibitor are released. Additional linkers and payloads (e.g., therapeutic agents, detectable labels, and cell penetrating payloads) are described herein.

[0656] Scheme 12 below depicts an exemplary modified nucleotide wherein the nucleobase, adenine, is attached to a linker at the C-7 carbon of 7-deaza adenine. In addition, Scheme 12 depicts the modified nucleotide with the linker and payload, e.g., a detectable agent, incorporated onto the 3′ end of the mRNA. Disulfide cleavage and 1,2-addition of the thiol group onto the propargyl ester releases the detectable agent. The remaining structure (depicted, for example, as pApC5Parg in Scheme 12) is the inhibitor. The rationale for the structure of the modified nucleotides is that the tethered inhibitor sterically interferes with the ability of the polymerase to incorporate a second base. Thus, it is critical that the tether be long enough to affect this function and that the inhibiter be in a stereochemical orientation that inhibits or prohibits second and follow on nucleotides into the growing polynucleotide strand.

[chemical structure]

[chemical structure]

[0657] For example, the cell phenotype altering polynucleotides, primary constructs or mmRNA described herein can be used in cell phenotype altering induced pluripotent stem cells (iPS cells), which can directly track cells that are transfected compared to total cells in the cluster. In another example, a drug that may be attached to the cell phenotype altering polynucleotides, primary constructs or mmRNA via a linker and may be fluorescently labeled can be used to track the drug in vivo, e.g. intracellularly. Other examples include, but are not limited to, the use of a cell phenotype altering polynucleotide, primary construct or mmRNA in reversible drug delivery into cells.

[0658] The cell phenotype altering polynucleotides, primary constructs or mmRNA described herein can be used in intracellular targeting of a payload, e.g., detectable or therapeutic agent, to specific organelle. Exemplary intracellular targets can include, but are not limited to, the nuclear localization for advanced mRNA processing, or a nuclear localization sequence (NLS) linked to the mRNA containing an inhibitor.

[0659] In addition, the cell phenotype altering polynucleotides, primary constructs or mmRNA described herein can be used to deliver therapeutic agents to cells or tissues, e.g., in living animals. For example, the cell phenotype altering polynucleotides, primary constructs or mmRNA attached to the therapeutic agent through a linker can facilitate member permeation allowing the therapeutic agent to travel into a cell to reach an intracellular target.

[0660] In some embodiments, the payload may be a therapeutic agent such as a cytotoxin, radioactive ion, chemotherapeutic, or other therapeutic agent. A cytotoxin or cytotoxic agent includes any agent that may be detrimental to cells. Examples include, but are not limited to, taxol, cytochalasin B, gramicidin D, ethidium bromide, emetine, mitomycin, etoposide, teniposide, vincristine, vinblastine, colchicine, doxorubicin, daunorubicin, dihydroxyanthracinedione, mitoxantrone, mithramycin, actinomycin D, 1-dehydrotestosterone, glucocorticoids, procaine, tetracaine, lidocaine, propranolol, puromycin, maytansinoids, e.g., maytansinol (see U.S. Pat. No. 5,208,020 incorporated herein in its entirety), rachelmycin (CC-1065, see U.S. Pat. Nos. 5,475,092, 5,585,499, and 5,846,545, all of which are incorporated herein by reference), and analogs or homologs thereof. Radioactive ions include, but are not limited to iodine (e.g., iodine 125 or iodine 131), strontium 89, phosphorous, palladium, cesium, iridium, phosphate, cobalt, yttrium 90, samarium 153, and praseodymium. Other therapeutic agents include, but are not limited to, antimetabolites (e.g., methotrexate, 6-mercaptopurine, 6-thioguanine, cytarabine, 5-fluorouracil decarbazine), alkylating agents (e.g., mechlorethamine, thiotepa chlorambucil, rachelmycin (CC-1065), melphalan, carmustine (BSNU), lomustine (CCNU), cyclophosphamide, busulfan, dibromomannitol, streptozotocin, mitomycin C, and cis-dichlorodiamine platinum (II) (DDP) cisplatin), anthracyclines (e.g., daunorubicin (formerly daunomycin) and doxorubicin), antibiotics (e.g., dactinomycin (formerly actinomycin), bleomycin, mithramycin, and anthramycin (AMC)), and anti-mitotic agents (e.g., vincristine, vinblastine, taxol and maytansinoids).

[0661] In some embodiments, the payload may be a detectable agent, such as various organic small molecules, inorganic compounds, nanoparticles, enzymes or enzyme substrates, fluorescent materials, luminescent materials (e.g., luminol), bioluminescent materials (e.g., luciferase, luciferin, and aequorin), chemiluminescent materials, radioactive materials (e.g., ¹⁸F, ⁶⁷Ga, ^{81m}Kr, ⁸²Rb, ¹¹¹In, ¹²³I, ¹³³Xe, ²⁰¹Tl, ¹²⁵I, ³⁵S, ¹⁴C, ³H, or ^{99m}Tc (e.g., as pertechnetate (technetate(VII), TcO₄⁻)), and contrast agents (e.g., gold (e.g., gold nanoparticles), gadolinium (e.g., chelated Gd), iron oxides (e.g., superparamagnetic iron oxide (SPIO), monocrystalline iron oxide nanoparticles (MIONs), and ultrasmall superparamagnetic iron oxide (USPIO)), manganese chelates (e.g., Mn-DPDP), barium sulfate, iodinated contrast media (iohexol), microbubbles, or perfluorocarbons). Such optically-detectable labels include for example, without limitation, 4-acetamido-4′-isothiocyanatostilbene-2,2′disulfonic acid; acridine and derivatives (e.g., acridine and acridine isothiocyanate); 5-(2′-aminoethyl)aminonaphthalene-1-sulfonic acid (EDANS); 4-amino-N-[3-vinylsulfonyl)phenyl]naphthalimide-3,5 disulfonate; N-(4-anilino-1-naphthyl)maleimide; anthranilamide; BODIPY; Brilliant Yellow; coumarin and derivatives (e.g., coumarin, 7-amino-4-methylcoumarin (AMC, Coumarin 120), and 7-amino-4-trifluoromethylcoumarin (Coumarin 151)); cyanine dyes; cyanosine; 4′,6-diaminidino-2-phenylindole (DAPI); 5′ 5″-dibromopyrogallol-sulfonaphthalein (Bromopyrogallol Red); 7-diethylamino-3-(4′-isothiocyanatophenyl)-4-methylcoumarin; diethylenetriamine pentaacetate; 4,4′-diisothiocyanatodihydro-stilbene-2,2′-disulfonic acid; 4,4′-diisothiocyanatostilbene-2,2′-disulfonic acid; 5-[dimethylamino]-naphthalene-1-sulfonyl chloride (DNS, dansylchloride); 4-dimethylaminophenylazophenyl-4′-isothiocyanate (DABITC); eosin and derivatives (e.g., eosin and eosin isothiocyanate); erythrosin and derivatives (e.g., erythrosin B and erythrosin isothiocyanate); ethidium; fluorescein and derivatives (e.g., 5-carboxyfluorescein (FAM), 5-(4,6-dichlorotriazin-2-yl)aminofluorescein (DTAF), 2′,7′-dimethoxy-4′5′-dichloro-6-carboxyfluorescein, fluorescein, fluorescein isothiocyanate, X-rhodamine-5-(and-6)-isothiocyanate (QFITC or XRITC), and fluorescamine); 2-[2-[3-[[1,3-dihydro-1,1-dimethyl-3-(3-sulfopropyl)-2H-benz[e]indol-2-ylidene]ethylidene]-2-[4-(ethoxycarbonyl)-1-piperazinyl]-1-cyclopenten-1-yl]ethenyl]-1,1-dimethyl-3-(3-sulforpropyl)-1H-benz[e]indolium hydroxide, inner salt, compound with n,n-diethylethanamine(1:1) (IR144); 5-chloro-2-[2-[3-[(5-chloro-3-ethyl-2(3H)-benzothiazol-ylidene)ethylidene]-2-(diphenylamino)-1-cyclopenten-1-yl]ethenyl]-3-ethyl benzothiazolium perchlorate (IR140); Malachite Green isothiocyanate; 4-methylumbelliferone orthocresolphthalein; nitrotyrosine; pararosaniline; Phenol Red; B-phycoerythrin; o-phthaldialdehyde; pyrene and derivatives (e.g., pyrene, pyrene butyrate, and succinimidyl 1-pyrene); butyrate quantum dots; Reactive Red 4 (CIBACRON™ Brilliant Red 3B-A); rhodamine and derivatives (e.g., 6-carboxy-X-rhodamine (ROX), 6-carboxyrhodamine (R6G), lissamine rhodamine B sulfonyl chloride rhodarnine (Rhod), rhodamine B, rhodamine 123, rhodamine X isothiocyanate, sulforhodamine B, sulforhodamine 101, sulfonyl chloride derivative of sulforhodamine 101 (Texas Red), N,N,N′,N′tetramethyl-6-carboxyrhodamine (TAMRA) tetramethyl rhodamine, and tetramethyl rhodamine isothiocyanate (TRITC)); riboflavin; rosolic acid; terbium chelate derivatives; Cyanine-3 (Cy3); Cyanine-5 (Cy5); cyanine-5.5 (Cy5.5), Cyanine-7 (Cy7); IRD 700; IRD 800; Alexa 647; La Jolta Blue; phthalo cyanine; and naphthalo cyanine.

[0662] In some embodiments, the detectable agent may be a non-detectable pre-cursor that becomes detectable upon activation (e.g., fluorogenic tetrazine-fluorophore constructs (e.g., tetrazine-BODIPY FL, tetrazine-Oregon Green 488, or tetrazine-BODIPY TMR-X) or enzyme activatable fluorogenic agents (e.g., PROSENSE® (VisEn Medical))). In vitro assays in which the enzyme labeled compositions can be used include, but are not limited to, enzyme linked immunosorbent assays (ELISAs), immunoprecipitation assays, immunofluorescence, enzyme immunoassays (EIA), radioimmunoassays (RIA), and Western blot analysis.

### Combinations

[0663] The cell phenotype altering polynucleotides, primary constructs or mmRNA may be used in combination with one or more other therapeutic, prophylactic, diagnostic, or imaging agents. By “in combination with,” it is not intended to imply that the agents must be administered at the same time and/or formulated for delivery together, although these methods of delivery are within the scope of the present disclosure. Compositions can be administered concurrently with, prior to, or subsequent to, one or more other desired therapeutics or medical procedures. In general, each agent will be administered at a dose and/or on a time schedule determined for that agent. In some embodiments, the present disclosure encompasses the delivery of pharmaceutical, prophylactic, diagnostic, or imaging compositions in combination with agents that may improve their bioavailability, reduce and/or modify their metabolism, inhibit their excretion, and/or modify their distribution within the body. As a non-limiting example, the cell phenotype altering polynucleotides, primary constructs and/or mmRNA may be used in combination with a pharmaceutical agent for the treatment of cancer or to control hyperproliferative cells. In U.S. Pat. No. 7,964,571, herein incorporated by reference in its entirety, a combination therapy for the treatment of solid primary or metastasized tumor is described using a pharmaceutical composition including a DNA plasmid encoding for interleukin-12 with a lipopolymer and also administering at least one anticancer agent or chemotherapeutic. Further, the cell phenotype altering polynucleotides, primary constructs and/or mmRNA of the present invention that encodes anti-proliferative molecules may be in a pharmaceutical composition with a lipopolymer (see e.g., U.S. Pub. No. 20110218231, herein incorporated by reference in its entirety, claiming a pharmaceutical composition comprising a DNA plasmid encoding an anti-proliferative molecule and a lipopolymer) which may be administered with at least one chemotherapeutic or anticancer agent.

### Dosing

[0664] The present invention provides methods comprising administering cell phenotype altering polynucleotides, primary constructs and/or mmRNA and their encoded cell phenotype altering proteins or complexes in accordance with the invention to a subject in need thereof. Cell phenotype altering nucleic acids, cell phenotype altering proteins or complexes, or pharmaceutical, imaging, diagnostic, or prophylactic compositions thereof, may be administered to a subject using any amount and any route of administration effective for preventing, treating, diagnosing, or imaging a disease, disorder, and/or condition (e.g., a disease, disorder, and/or condition relating to working memory deficits). The exact amount required will vary from subject to subject, depending on the species, age, and general condition of the subject, the severity of the disease, the particular composition, its mode of administration, its mode of activity, and the like. Compositions in accordance with the invention are typically formulated in dosage unit form for ease of administration and uniformity of dosage. It will be understood, however, that the total daily usage of the compositions of the present invention may be decided by the attending physician within the scope of sound medical judgment. The specific therapeutically effective, prophylactically effective, or appropriate imaging dose level for any particular patient will depend upon a variety of factors including the disorder being treated and the severity of the disorder; the activity of the specific compound employed; the specific composition employed; the age, body weight, general health, sex and diet of the patient; the time of administration, route of administration, and rate of excretion of the specific compound employed; the duration of the treatment; drugs used in combination or coincidental with the specific compound employed; and like factors well known in the medical arts.

[0665] In certain embodiments, compositions in accordance with the present invention may be administered at dosage levels sufficient to deliver from about 0.0001 mg/kg to about 100 mg/kg, from about 0.001 mg/kg to about 0.05 mg/kg, from about 0.005 mg/kg to about 0.05 mg/kg, from about 0.001 mg/kg to about 0.005 mg/kg, from about 0.05 mg/kg to about 0.5 mg/kg, from about 0.01 mg/kg to about 50 mg/kg, from about 0.1 mg/kg to about 40 mg/kg, from about 0.5 mg/kg to about 30 mg/kg, from about 0.01 mg/kg to about 10 mg/kg, from about 0.1 mg/kg to about 10 mg/kg, or from about 1 mg/kg to about 25 mg/kg, of subject body weight per day, one or more times a day, to obtain the desired therapeutic, diagnostic, prophylactic, or imaging effect. The desired dosage may be delivered three times a day, two times a day, once a day, every other day, every third day, every week, every two weeks, every three weeks, or every four weeks. In certain embodiments, the desired dosage may be delivered using multiple administrations (e.g., two, three, four, five, six, seven, eight, nine, ten, eleven, twelve, thirteen, fourteen, or more administrations).

[0666] According to the present invention, it has been discovered that administration of cell phenotype altering mmRNA in split-dose regimens produce higher levels of cell phenotype altering proteins in mammalian subjects. As used herein, a “split dose” is the division of single unit dose or total daily dose into two or more doses, e.g, two or more administrations of the single unit dose. As used herein, a “single unit dose” is a dose of any therapeutic administered in one dose/at one time/single route/single point of contact, i.e., single administration event. As used herein, a “total daily dose” is an amount given or prescribed in 24 hr period. It may be administered as a single unit dose. In one embodiment, the mmRNA of the present invention are administered to a subject in split doses. The mmRNA may be formulated in buffer only or in a formulation described herein.

### Dosage Forms

[0667] A pharmaceutical composition described herein can be formulated into a dosage form described herein, such as a topical, intranasal, intratracheal, or injectable (e.g., intravenous, intraocular, intravitreal, intramuscular, intracardiac, intraperitoneal, subcutaneous).

### Liquid Dosage Forms

[0668] Liquid dosage forms for parenteral administration include, but are not limited to, pharmaceutically acceptable emulsions, microemulsions, solutions, suspensions, syrups, and/or elixirs. In addition to active ingredients, liquid dosage forms may comprise inert diluents commonly used in the art including, but not limited to, water or other solvents, solubilizing agents and emulsifiers such as ethyl alcohol, isopropyl alcohol, ethyl carbonate, ethyl acetate, benzyl alcohol, benzyl benzoate, propylene glycol, 1,3-butylene glycol, dimethylformamide, oils (in particular, cottonseed, groundnut, corn, germ, olive, castor, and sesame oils), glycerol, tetrahydrofurfuryl alcohol, polyethylene glycols and fatty acid esters of sorbitan, and mixtures thereof. In certain embodiments for parenteral administration, compositions may be mixed with solubilizing agents such as CREMOPHOR®, alcohols, oils, modified oils, glycols, polysorbates, cyclodextrins, polymers, and/or combinations thereof.

### Injectable

[0669] Injectable preparations, for example, sterile injectable aqueous or oleaginous suspensions may be formulated according to the known art and may include suitable dispersing agents, wetting agents, and/or suspending agents. Sterile injectable preparations may be sterile injectable solutions, suspensions, and/or emulsions in nontoxic parenterally acceptable diluents and/or solvents, for example, a solution in 1,3-butanediol. Among the acceptable vehicles and solvents that may be employed include, but are not limited to, are water, Ringer's solution, U.S.P., and isotonic sodium chloride solution. Sterile, fixed oils are conventionally employed as a solvent or suspending medium. For this purpose any bland fixed oil can be employed including synthetic mono- or diglycerides. Fatty acids such as oleic acid can be used in the preparation of injectables.

[0670] Injectable formulations can be sterilized, for example, by filtration through a bacterial-retaining filter, and/or by incorporating sterilizing agents in the form of sterile solid compositions which can be dissolved or dispersed in sterile water or other sterile injectable medium prior to use.

[0671] In order to prolong the effect of an active ingredient, it may be desirable to slow the absorption of the active ingredient from subcutaneous or intramuscular injection. This may be accomplished by the use of a liquid suspension of crystalline or amorphous material with poor water solubility. The rate of absorption of the cell phenotype altering polynucleotide, primary construct or mmRNA then depends upon its rate of dissolution which, in turn, may depend upon crystal size and crystalline form. Alternatively, delayed absorption of a parenterally administered cell phenotype altering polynucleotide, primary construct or mmRNA may be accomplished by dissolving or suspending the cell phenotype altering polynucleotide, primary construct or mmRNA in an oil vehicle. Injectable depot forms are made by forming microencapsule matrices of the cell phenotype altering polynucleotide, primary construct or mmRNA in biodegradable polymers such as polylactide-polyglycolide. Depending upon the ratio of cell phenotype altering polynucleotide, primary construct or mmRNA to polymer and the nature of the particular polymer employed, the rate of cell phenotype altering polynucleotide, primary construct or mmRNA release can be controlled. Examples of other biodegradable polymers include, but are not limited to, poly(orthoesters) and poly(anhydrides). Depot injectable formulations may be prepared by entrapping the cell phenotype altering polynucleotide, primary construct or mmRNA in liposomes or microemulsions which are compatible with body tissues.

### Pulmonary

[0672] Formulations described herein as being useful for pulmonary delivery may also be use for intranasal delivery of a pharmaceutical composition. Another formulation suitable for intranasal administration may be a coarse powder comprising the active ingredient and having an average particle from about 0.2 μm to 500 μm. Such a formulation may be administered in the manner in which snuff is taken, i.e. by rapid inhalation through the nasal passage from a container of the powder held close to the nose.

[0673] Formulations suitable for nasal administration may, for example, comprise from about as little as 0.1% (w/w) and as much as 100% (w/w) of active ingredient, and may comprise one or more of the additional ingredients described herein. A pharmaceutical composition may be prepared, packaged, and/or sold in a formulation suitable for buccal administration. Such formulations may, for example, be in the form of tablets and/or lozenges made using conventional methods, and may, for example, contain about 0.1% to 20% (w/w) active ingredient, where the balance may comprise an orally dissolvable and/or degradable composition and, optionally, one or more of the additional ingredients described herein. Alternately, formulations suitable for buccal administration may comprise a powder and/or an aerosolized and/or atomized solution and/or suspension comprising active ingredient. Such powdered, aerosolized, and/or aerosolized formulations, when dispersed, may have an average particle and/or droplet size in the range from about 0.1 nm to about 200 nm, and may further comprise one or more of any additional ingredients described herein.

[0674] General considerations in the formulation and/or manufacture of pharmaceutical agents may be found, for example, in Remington: The Science and Practice of Pharmacy 21^{st} ed., Lippincott Williams & Wilkins, 2005 (incorporated herein by reference).

### Coatings or Shells

[0675] Solid dosage forms of tablets, dragees, capsules, pills, and granules can be prepared with coatings and shells such as enteric coatings and other coatings well known in the pharmaceutical formulating art. They may optionally comprise opacifying agents and can be of a composition that they release the active ingredient(s) only, or preferentially, in a certain part of the intestinal tract, optionally, in a delayed manner. Examples of embedding compositions which can be used include polymeric substances and waxes. Solid compositions of a similar type may be employed as fillers in soft and hard-filled gelatin capsules using such excipients as lactose or milk sugar as well as high molecular weight polyethylene glycols and the like.

### Properties of Pharmaceutical Compositions

[0676] The pharmaceutical compositions described herein can be characterized by one or more of bioavailability, therapeutic window and/or volume of distribution.

### Bioavailability

[0677] The cell phenotype altering polynucleotides, primary constructs or mmRNA, when formulated into a composition with a delivery agent as described herein, can exhibit an increase in bioavailability as compared to a composition lacking a delivery agent as described herein. As used herein, the term “bioavailability” refers to the systemic availability of a given amount of cell phenotype altering polynucleotides, primary constructs or mmRNA administered to a mammal. Bioavailability can be assessed by measuring the area under the curve (AUC) or the maximum serum or plasma concentration (Cₘₐₓ) of the unchanged form of a compound following administration of the compound to a mammal. AUC is a determination of the area under the curve plotting the serum or plasma concentration of a compound along the ordinate (Y-axis) against time along the abscissa (X-axis). Generally, the AUC for a particular compound can be calculated using methods known to those of ordinary skill in the art and as described in G. S. Banker, Modern Pharmaceutics, Drugs and the Pharmaceutical Sciences, v. 72, Marcel Dekker, New York, Inc., 1996, herein incorporated by reference.

[0678] The Cₘₐₓ value is the maximum concentration of the compound achieved in the serum or plasma of a mammal following administration of the compound to the mammal. The Cₘₐₓ value of a particular compound can be measured using methods known to those of ordinary skill in the art. The phrases “increasing bioavailability” or “improving the pharmacokinetics,” as used herein mean that the systemic availability of a first cell phenotype altering polynucleotide, primary construct or mmRNA, measured as AUC, Cₘₐₓ, or Cₘᵢₙ in a mammal is greater, when co-administered with a delivery agent as described herein, than when such co-administration does not take place. In some embodiments, the bioavailability of the cell phenotype altering polynucleotide, primary construct or mmRNA can increase by at least about 2%, at least about 5%, at least about 10%, at least about 15%, at least about 20%, at least about 25%, at least about 30%, at least about 35%, at least about 40%, at least about 45%, at least about 50%, at least about 55%, at least about 60%, at least about 65%, at least about 70%, at least about 75%, at least about 80%, at least about 85%, at least about 90%, at least about 95%, or about 100%.

### Therapeutic Window

[0679] The cell phenotype altering polynucleotides, primary constructs or mmRNA, when formulated into a composition with a delivery agent as described herein, can exhibit an increase in the therapeutic window of the administered cell phenotype altering polynucleotide, primary construct or mmRNA composition as compared to the therapeutic window of the administered cell phenotype altering polynucleotide, primary construct or mmRNA composition lacking a delivery agent as described herein. As used herein “therapeutic window” refers to the range of plasma concentrations, or the range of levels of therapeutically active substance at the site of action, with a high probability of eliciting a therapeutic effect. In some embodiments, the therapeutic window of the cell phenotype altering polynucleotide, primary construct or mmRNA when co-administered with a delivery agent as described herein can increase by at least about 2%, at least about 5%, at least about 10%, at least about 15%, at least about 20%, at least about 25%, at least about 30%, at least about 35%, at least about 40%, at least about 45%, at least about 50%, at least about 55%, at least about 60%, at least about 65%, at least about 70%, at least about 75%, at least about 80%, at least about 85%, at least about 90%, at least about 95%, or about 100%.

### Volume of Distribution

[0680] The cell phenotype altering polynucleotides, primary constructs or mmRNA, when formulated into a composition with a delivery agent as described herein, can exhibit an improved volume of distribution (V_{dist}), e.g., reduced or targeted, relative to a composition lacking a delivery agent as described herein. The volume of distribution (V_{dist}) relates the amount of the drug in the body to the concentration of the drug in the blood or plasma. As used herein, the term “volume of distribution” refers to the fluid volume that would be required to contain the total amount of the drug in the body at the same concentration as in the blood or plasma: V_{dist} equals the amount of drug in the body/concentration of drug in blood or plasma. For example, for a 10 mg dose and a plasma concentration of 10 mg/L, the volume of distribution would be 1 liter. The volume of distribution reflects the extent to which the drug is present in the extravascular tissue. A large volume of distribution reflects the tendency of a compound to bind to the tissue components compared with plasma protein binding. In a clinical setting, V_{dist} can be used to determine a loading dose to achieve a steady state concentration. In some embodiments, the volume of distribution of the cell phenotype altering polynucleotide, primary construct or mmRNA when co-administered with a delivery agent as described herein can decrease at least about 2%, at least about 5%, at least about 10%, at least about 15%, at least about 20%, at least about 25%, at least about 30%, at least about 35%, at least about 40%, at least about 45%, at least about 50%, at least about 55%, at least about 60%, at least about 65%, at least about 70%.

### Biological Effect

[0681] In one embodiment, the biological effect of the modified cell phenotype altering mRNA delivered to the animals may be categorized by analyzing the protein expression in the animals. The reprogrammed protein expression may be determined from analyzing a biological sample collected from a mammal administered the modified cell phenotype altering mRNA of the present invention. In one embodiment, the expression protein encoded by the modified cell phenotype altering mRNA administered to the mammal of at least 50 pg/ml may be preferred. For example, a protein expression of 50-200 pg/ml for the protein encoded by the modified cell phenotype altering mRNA delivered to the mammal may be seen as a therapeutically effective amount of protein in the mammal.

### Detection of Modified Nucleic Acids by Mass Spectrometry

[0682] Mass spectrometry (MS) is an analytical technique that can provide structural and molecular mass/concentration information on molecules after their conversion to ions. The molecules are first ionized to acquire positive or negative charges and then they travel through the mass analyzer to arrive at different areas of the detector according to their mass/charge (m/z) ratio.

[0683] Mass spectrometry is performed using a mass spectrometer which includes an ion source for ionizing the fractionated sample and creating charged molecules for further analysis. For example ionization of the sample may be performed by electrospray ionization (ESI), atmospheric pressure chemical ionization (APCI), photoionization, electron ionization, fast atom bombardment (FAB)/liquid secondary ionization (LSIMS), matrix assisted laser desorption/ionization (MALDI), field ionization, field desorption, thermospray/plasmaspray ionization, and particle beam ionization. The skilled artisan will understand that the choice of ionization method can be determined based on the analyte to be measured, type of sample, the type of detector, the choice of positive versus negative mode, etc.

[0684] After the sample has been ionized, the positively charged or negatively charged ions thereby created may be analyzed to determine a mass-to-charge ratio (i.e., m/z). Suitable analyzers for determining mass-to-charge ratios include quadropole analyzers, ion traps analyzers, and time-of-flight analyzers. The ions may be detected using several detection modes. For example, selected ions may be detected (i.e., using a selective ion monitoring mode (SIM)), or alternatively, ions may be detected using a scanning mode, e.g., multiple reaction monitoring (MRM) or selected reaction monitoring (SRM).

[0685] Liquid chromatography-multiple reaction monitoring (LC-MS/MRM) coupled with stable isotope labeled dilution of peptide standards has been shown to be an effective method for protein verification (e.g., Keshishian et al., Mol Cell Proteomics 2009 8: 2339-2349; Kuhn et al., Clin Chem 2009 55:1108-1117; Lopez et al., Clin Chem 2010 56:281-290). Unlike untargeted mass spectrometry frequently used in biomarker discovery studies, targeted MS methods are peptide sequence-based modes of MS that focus the full analytical capacity of the instrument on tens to hundreds of selected peptides in a complex mixture. By restricting detection and fragmentation to only those peptides derived from proteins of interest, sensitivity and reproducibility are improved dramatically compared to discovery-mode MS methods. This method of mass spectrometry-based multiple reaction monitoring (MRM) quantitation of proteins can dramatically impact the discovery and quantitation of biomarkers via rapid, targeted, multiplexed protein expression profiling of clinical samples.

[0686] In one embodiment, a biological sample which may contain at least one protein encoded by at least one modified cell phenotype altering mRNA of the present invention may be analyzed by the method of MRM-MS. The quantification of the biological sample may further include, but is not limited to, isotopically labeled peptides or proteins as internal standards.

[0687] According to the present invention, the biological sample, once obtained from the subject, may be subjected to enzyme digestion. As used herein, the term “digest” means to break apart into shorter peptides. As used herein, the phrase “treating a sample to digest proteins” means manipulating a sample in such a way as to break down proteins in a sample. These enzymes include, but are not limited to, trypsin, endoproteinase Glu-C and chymotrypsin. In one embodiment, a biological sample which may contain at least one protein encoded by at least one modified cell phenotype altering mRNA of the present invention may be digested using enzymes.

[0688] In one embodiment, a biological sample which may contain protein encoded by modified cell phenotype altering mRNA of the present invention may be analyzed for protein using electrospray ionization. Electrospray ionization (ESI) mass spectrometry (ESIMS) uses electrical energy to aid in the transfer of ions from the solution to the gaseous phase before they are analyzed by mass spectrometry. Samples may be analyzed using methods known in the art (e.g., Ho et al., Clin Biochem Rev. 2003 24(1):3-12). The ionic species contained in solution may be transferred into the gas phase by dispersing a fine spray of charge droplets, evaporating the solvent and ejecting the ions from the charged droplets to generate a mist of highly charged droplets. The mist of highly charged droplets may be analyzed using at least 1, at least 2, at least 3 or at least 4 mass analyzers such as, but not limited to, a quadropole mass analyzer. Further, the mass spectrometry method may include a purification step. As a non-limiting example, the first quadrapole may be set to select a single m/z ratio so it may filter out other molecular ions having a different m/z ratio which may eliminate complicated and time-consuming sample purification procedures prior to MS analysis.

[0689] In one embodiment, a biological sample which may contain protein encoded by modified cell phenotype altering mRNA of the present invention may be analyzed for protein in a tandem ESIMS system (e.g., MS/MS). As non-limiting examples, the droplets may be analyzed using a product scan (or daughter scan) a precursor scan (parent scan) a neutral loss or a multiple reaction monitoring.

[0690] In one embodiment, a biological sample which may contain protein encoded by modified cell phenotype altering mRNA of the present invention may be analyzed using matrix-assisted laser desorption/ionization (MALDI) mass spectrometry (MALDIMS). MALDI provides for the nondestructive vaporization and ionization of both large and small molecules, such as proteins. In MALDI analysis, the analyte is first co-crystallized with a large molar excess of a matrix compound, which may also include, but is not limited to, an ultraviolet absorbing weak organic acid. Non-limiting examples of matrices used in MALDI are α-cyano-4-hydroxycinnamic acid, 3,5-dimethoxy-4-hydroxycinnamic acid and 2,5-dihydroxybenzoic acid. Laser radiation of the analyte-matrix mixture may result in the vaporization of the matrix and the analyte. The laser induced desorption provides high ion yields of the intact analyte and allows for measurement of compounds with high accuracy. Samples may be analyzed using methods known in the art (e.g., Lewis, Wei and Siuzdak, Encyclopedia of Analytical Chemistry 2000:5880-5894). As non-limiting examples, mass analyzers used in the MALDI analysis may include a linear time-of-flight (TOF), a TOF reflectron or a Fourier transform mass analyzer.

[0691] In one embodiment, the analyte-matrix mixture may be formed using the dried-droplet method. A biologic sample is mixed with a matrix to create a saturated matrix solution where the matrix-to-sample ratio is approximately 5000:1. An aliquot (approximately 0.5-2.0 uL) of the saturated matrix solution is then allowed to dry to form the analyte-matrix mixture.

[0692] In one embodiment, the analyte-matrix mixture may be formed using the thin-layer method. A matrix homogeneous film is first formed and then the sample is then applied and may be absorbed by the matrix to form the analyte-matrix mixture.

[0693] In one embodiment, the analyte-matrix mixture may be formed using the thick-layer method. A matrix homogeneous film is formed with a nitro-cellulose matrix additive. Once the uniform nitro-cellulose matrix layer is obtained the sample is applied and absorbed into the matrix to form the analyte-matrix mixture.

[0694] In one embodiment, the analyte-matrix mixture may be formed using the sandwich method. A thin layer of matrix crystals is prepared as in the thin-layer method followed by the addition of droplets of aqueous trifluoroacetic acid, the sample and matrix. The sample is then absorbed into the matrix to form the analyte-matrix mixture.

### V. USES OF POLYNUCLEOTIDES, PRIMARY CONSTRUCTS AND MMRNA OF THE INVENTION

[0695] The polynucleotides, primary constructs and mmRNA of the present invention may be used to alter the phenotype of cells. The polynucleotides, primary constructs and mmRNA of the invention may encode peptides, polypeptides or multiple proteins to produce cell phenotype altering polypeptides of interest. The cell phenotype altering polypeptides of interest may be used in therapeutics and/or clinical and research settings. As a non-limiting example, the cell phenotype altering polypeptides of interest may include reprogramming factors, differentiation factors and de-differentiation factors.

### Therapeutics

### Therapeutic Agents

[0696] The cell phenotype altering polynucleotides, primary constructs or mmRNA of the present invention, such as modified cell phenotype altering nucleic acids and modified cell phenotype altering RNAs, and the cell phenotype altering proteins translated from them described herein can be used as therapeutic or prophylactic agents. They are provided for use in medicine, therapy and preventative treatments. For example, a cell phenotype altering polynucleotide, primary construct or mmRNA described herein can be administered to a subject, wherein the cell phenotype altering polynucleotide, primary construct or mmRNA is translated in vivo to produce a therapeutic or prophylactic polypeptide in the subject. Provided are compositions, methods, kits, and reagents for diagnosis, treatment or prevention of a disease or condition in humans and other mammals. The active therapeutic agents of the invention include cell phenotype altering polynucleotides, primary constructs or mmRNA, cells containing the cell phenotype altering polynucleotides, primary constructs or mmRNA or cell phenotype altering polypeptides translated from the cell phenotype altering polynucleotides, primary constructs or mmRNA.

[0697] In certain embodiments, provided herein are combination therapeutics containing one or more cell phenotype altering polynucleotide, primary construct or mmRNA containing translatable regions that encode for a cell phenotype altering protein or proteins such as a reprogramming, differentiation or de-differentiation protein.

[0698] Provided herein are methods of inducing translation of a recombinant cell phenotype altering polypeptide in a cell population using the cell phenotype altering polynucleotide, primary construct or mmRNA described herein. Such translation can be in vivo, ex vivo, in culture, or in vitro. The cell population is contacted with an effective amount of a composition containing a cell phenotype altering nucleic acid that has at least one nucleoside modification, and a translatable region encoding the recombinant polypeptide. The population is contacted under conditions such that the nucleic acid is localized into one or more cells of the cell population and the recombinant cell phenotype altering polypeptide is translated in the cell from the cell phenotype altering nucleic acid.

[0699] An “effective amount” of the composition is provided based, at least in part, on the target tissue, target cell type, means of administration, physical characteristics of the nucleic acid (e.g., size, and extent of modified nucleosides), and other determinants. In general, an effective amount of the composition provides efficient protein production in the cell, preferably more efficient than a composition containing a corresponding unmodified nucleic acid. Increased efficiency may be demonstrated by increased cell transfection (i.e., the percentage of cells transfected with the nucleic acid), increased protein translation from the nucleic acid, decreased nucleic acid degradation (as demonstrated, e.g., by increased duration of protein translation from a modified nucleic acid), or reduced innate immune response of the host cell.

[0700] Aspects of the invention are directed to methods of inducing in vivo translation of a recombinant cell phenotype altering polypeptide in a mammalian subject in need thereof. Therein, an effective amount of a composition containing a nucleic acid that has at least one structural or chemical modification and a translatable region encoding the recombinant cell phenotype altering polypeptide is administered to the subject using the delivery methods described herein. The cell phenotype altering nucleic acid is provided in an amount and under other conditions such that the nucleic acid is localized into a cell of the subject and the recombinant cell phenotype altering polypeptide is translated in the cell from the cell phenotype altering nucleic acid. The cell in which the cell phenotype altering nucleic acid is localized, or the tissue in which the cell is present, may be targeted with one or more than one rounds of cell phenotype altering nucleic acid administration.

[0701] In certain embodiments, the administered cell phenotype altering polynucleotide, primary construct or mmRNA directs production of one or more recombinant cell phenotype altering polypeptides that provide a functional activity which is substantially absent in the cell, tissue or organism in which the recombinant polypeptide is translated. For example, the missing functional activity may be enzymatic, structural, or gene regulatory in nature. In related embodiments, the administered cell phenotype altering polynucleotide, primary construct or mmRNA directs production of one or more recombinant cell phenotype altering polypeptides that increases (e.g., synergistically) a functional activity which is present but substantially deficient in the cell in which the recombinant cell phenotype altering polypeptide is translated.

[0702] In other embodiments, the administered cell phenotype altering polynucleotide, primary construct or mmRNA directs production of one or more recombinant polypeptides that replace a polypeptide (or multiple polypeptides) that is substantially absent in the cell in which the recombinant cell phenotype altering polypeptide is translated. Such absence may be due to genetic mutation of the encoding cell phenotype altering gene or regulatory pathway thereof. In some embodiments, the recombinant cell phenotype altering polypeptide increases the level of an endogenous cell phenotype altering protein in the cell to a desirable level; such an increase may bring the level of the endogenous cell phenotype altering protein from a subnormal level to a normal level or from a normal level to a super-normal level.

[0703] Alternatively, the recombinant cell phenotype altering polypeptide functions to antagonize the activity of an endogenous protein present in, on the surface of, or secreted from the cell. Usually, the activity of the endogenous cell phenotype altering protein is deleterious to the subject; for example, due to mutation of the endogenous protein resulting in altered activity or localization. Additionally, the recombinant cell phenotype altering polypeptide antagonizes, directly or indirectly, the activity of a biological moiety present in, on the surface of, or secreted from the cell. Examples of antagonized biological moieties include lipids (e.g., cholesterol), a lipoprotein (e.g., low density lipoprotein), a nucleic acid, a carbohydrate, a protein toxin such as shiga and tetanus toxins, or a small molecule toxin such as botulinum, cholera, and diphtheria toxins. Additionally, the antagonized biological molecule may be an endogenous protein that exhibits an undesirable activity, such as a cytotoxic or cytostatic activity.

[0704] The recombinant cell phenotype altering proteins described herein may be engineered for localization within the cell, potentially within a specific compartment such as the nucleus, or are engineered for secretion from the cell or translocation to the plasma membrane of the cell.

[0705] In some embodiments, modified cell phenotype altering mRNAs and their encoded cell phenotype altering polypeptides in accordance with the present invention may be used for treatment of any of a variety of diseases, disorders, and/or conditions, including but not limited to one or more of the following: autoimmune disorders (e.g. diabetes, lupus, multiple sclerosis, psoriasis, rheumatoid arthritis); inflammatory disorders (e.g. arthritis, pelvic inflammatory disease); infectious diseases (e.g. viral infections (e.g., HIV, HCV, RSV), bacterial infections, fungal infections, sepsis); neurological disorders (e g. Alzheimer's disease, Huntington's disease; autism; Duchenne muscular dystrophy); cardiovascular disorders (e.g. atherosclerosis, hypercholesterolemia, thrombosis, clotting disorders, angiogenic disorders such as macular degeneration); proliferative disorders (e.g. cancer, benign neoplasms); respiratory disorders (e.g. chronic obstructive pulmonary disease); digestive disorders (e.g. inflammatory bowel disease, ulcers); musculoskeletal disorders (e.g. fibromyalgia, arthritis); endocrine, metabolic, and nutritional disorders (e.g. diabetes, osteoporosis); urological disorders (e.g. renal disease); psychological disorders (e.g. depression, schizophrenia); skin disorders (e.g. wounds, eczema); blood and lymphatic disorders (e.g. anemia, hemophilia); etc.

[0706] Diseases characterized by dysfunctional or aberrant protein activity include cystic fibrosis, sickle cell anemia, epidermolysis bullosa, amyotrophic lateral sclerosis, and glucose-6-phosphate dehydrogenase deficiency. The present invention provides a method for treating such conditions or diseases in a subject by introducing nucleic acid or cell-based therapeutics containing the cell phenotype altering polynucleotide, primary construct or mmRNA provided herein, wherein the cell phenotype altering polynucleotide, primary construct or mmRNA encode for a protein that antagonizes or otherwise overcomes the aberrant protein activity present in the cell of the subject. Specific examples of a dysfunctional protein are the missense mutation variants of the cystic fibrosis transmembrane conductance regulator (CFTR) gene, which produce a dysfunctional protein variant of CFTR protein, which causes cystic fibrosis.

[0707] Diseases characterized by missing (or substantially diminished such that proper (normal or physiological protein function does not occur) protein activity include cystic fibrosis, Niemann-Pick type C, β thalassemia major, Duchenne muscular dystrophy, Hurler Syndrome, Hunter Syndrome, and Hemophilia A. Such proteins may not be present, or are essentially non-functional. The present invention provides a method for treating such conditions or diseases in a subject by introducing nucleic acid or cell-based therapeutics containing the cell phenotype altering polynucleotide, primary construct or mmRNA provided herein, wherein the cell phenotype altering polynucleotide, primary construct or mmRNA encode for a protein that replaces the protein activity missing from the target cells of the subject. Specific examples of a dysfunctional protein are the nonsense mutation variants of the cystic fibrosis transmembrane conductance regulator (CFTR) gene, which produce a nonfunctional protein variant of CFTR protein, which causes cystic fibrosis.

[0708] Thus, provided are methods of treating cystic fibrosis in a mammalian subject by contacting a cell of the subject with a cell phenotype altering polynucleotide, primary construct or mmRNA having a translatable region that encodes a functional CFTR polypeptide, under conditions such that an effective amount of the CTFR polypeptide is present in the cell. Preferred target cells are epithelial, endothelial and mesothelial cells, such as the lung, and methods of administration are determined in view of the target tissue; i.e., for lung delivery, the RNA molecules are formulated for administration by inhalation.

[0709] Other aspects of the present disclosure relate to transplantation of cells containing cell phenotype altering polynucleotide, primary construct, or mmRNA to a mammalian subject. Administration of cells to mammalian subjects is known to those of ordinary skill in the art, and include, but is not limited to, local implantation (e.g., topical or subcutaneous administration), organ delivery or systemic injection (e.g., intravenous injection or inhalation), and the formulation of cells in pharmaceutically acceptable carrier. Such compositions containing polynucleotide, primary construct, or mmRNA can be formulated for administration intramuscularly, transarterially, intraperitoneally, intravenously, intranasally, subcutaneously, endoscopically, transdermally, or intrathecally. In some embodiments, the composition may be formulated for extended release.

[0710] The subject to whom the therapeutic agent may be administered suffers from or may be at risk of developing a disease, disorder, or deleterious condition. Provided are methods of identifying, diagnosing, and classifying subjects on these bases, which may include clinical diagnosis, biomarker levels, genome-wide association studies (GWAS), and other methods known in the art.

### Reprogramming of Cells

[0711] In one embodiment, the cell phenotype altering polynucleotides, primary constructs and/or mmRNA may be used to reprogram a cell. The reprogramming of a cell may be accomplished by a single or repeated transfection of a cell, such as, but not limited to, a somatic cell, with a cell phenotype altering polynucleotide, primary construct and/or mmRNA of the present invention encoding a reprogramming factor. As a non-limiting example, the reprogramming factor may include, OCT4, SOX1, SOX2, SOX3, SOX15, SOX18, NANOG, KLF1, KLF2, KLF4, KL5, NR5A2, c-MYC, 1-MYC, n-MYC, REM2, TERT and LIN28.

[0712] In another embodiment, a cell may be reprogrammed by contacting the cell at least once with a cell phenotype altering polynucleotide, primary construct and/or mmRNA encoding OCT4. Further, the cell may be contacted at least once with a cell phenotype altering polynucleotide, primary construct and/or mmRNA encoding a member of the SOX family. Additionally the cell may be contacted at least once with a cell phenotype altering polynucleotide, primary construct and/or mmRNA encoding a member of the KLF family or a cell phenotype altering polynucleotide, primary construct and/or mmRNA encoding a member of the MYC family.

[0713] In one embodiment, a cell may be reprogrammed by contacting the cell to be reprogrammed at least once with a cell phenotype altering polynucleotide, primary construct and/or mmRNA encoding OCT4 and a cell phenotype altering polynucleotide, primary construct and/or mmRNA encoding a member of the SOX family. In a further embodiment, the cell may additionally be contacted at least once with a cell phenotype altering polynucleotide, primary construct and/or mmRNA encoding a member of the KLF family or LIN28. In yet another embodiment, the cell may be contacted at least once with a cell phenotype altering polynucleotide, primary construct and/or mmRNA encoding a member of the MYC family or NANOG.

[0714] In one embodiment, a cell is repeatedly contacted with a cell phenotype altering polynucleotide, primary construct and/or mmRNA encoding OCT4, a cell phenotype altering polynucleotide, primary construct and/or mmRNA encoding a member of the SOX family, a cell phenotype altering polynucleotide, primary construct and/or mmRNA encoding a member of the KLF family and a cell phenotype altering polynucleotide, primary construct and/or mmRNA encoding a member of the MYC family. In a further embodiment, the cell is a somatic cell.

[0715] In one embodiment, a cell is repeatedly contacted with a cell phenotype altering polynucleotide, primary construct and/or mmRNA encoding OCT4, a cell phenotype altering polynucleotide, primary construct and/or mmRNA encoding a member of the SOX family, a cell phenotype altering polynucleotide, primary construct and/or mmRNA encoding a member of the LIN28 and a cell phenotype altering polynucleotide, primary construct and/or mmRNA encoding a member of the NANOG. In a further embodiment, the cell is a somatic cell.

[0716] Cells may be transfected with the cell phenotype altering polynucleotides, primary constructs and/or mmRNA of the present invention encoding reprogramming factors once or multiple times in order to permit sufficient expression of the reprogramming factors in cells being contacted. Repeated transfection can include, but is not limited to, at least one, at least two, at least three, at least four, at least five, at least six, at least seven, at least eight, at least nine, at least ten, at least fifteen, at least twenty, at least twenty five, at least thirty, at least thirty five or more transfections. The transfection of cells with the cell phenotype altering polynucleotides, primary constructs and/or mmRNA of the present invention encoding reprogramming factors may be repeated as many times as necessary to achieve the desired phenotype of the cell or population of cells contacted.

[0717] In one embodiment, transfection of cells with the cell phenotype altering polynucleotides, primary constructs and/or mmRNA of the present invention encoding reprogramming factors may produce pluripotent cells from a starting population of cells in less than 30 days, less than 29 days, less than 28 days, less than 27 days, less than 26 days, less than 25 days, less than 24 days, less than 23 days, less than 22 days, less than 21 days, less than 20 days, less than 19 days, less than 18 days, less than 17 days, less than 16 days, less than 15 days, less than 14 days, less than 13 days, less than 12 days, less than 11 days, less than 10 days, less than 9 days, less than 8 days, less than 7 days. In another embodiment, transfection of cells with the cell phenotype altering polynucleotides, primary constructs and/or mmRNA of the present invention encoding reprogramming factors may produce pluripotent cells from a starting population of cells in greater than 7 days.

[0718] In order to enhance the efficiency of reprogramming cells with the cell phenotype altering polynucleotides, primary constructs and/or mmRNA of the present invention encoding a reprogramming factor, at least one small molecule enhancing the efficiency of reprogramming may be added to the process. These small molecules include, but are not limited to, the small molecules shown by Shi et al. (Cell-Stem Cell, 2008, 2:525-528; herein incorporated by reference in its entirety), Huangfu et al. (Nature Biotechnology, 2008, 26(7):795-797; herein incorporated by reference in its entirety) and Marson et al. (Cell-Stem Cell, 2008, 3:132-135; herein incorporated by reference in its entirety). As a non-limiting example, small molecules that may enhance the efficiency of reprogramming include trichostatin (TSA), soluble Wnt, Wnt conditioned media, hydroxamic acid (SAHA), BIX-01294 (a G9a histone methyltransferase), suberoylanide, dexamethasone, 5′-azacytidine, MEK inhibitor PD0325901, valproic acid, DNA mehtyltransferase inhibitors, and histone deacetylase (HDAC) inhibitors.

[0719] The efficiency of reprogramming cells with the cell phenotype altering polynucleotides, primary constructs and/or mmRNA of the present invention encoding reprogramming factors to a pluripotent cell from a starting population of cells can be at least 1%, at least 1.2%, at least 1.4%, at least 1.6%, at least 1.8%, at least 2.1%, at least 2.2%, at least 2.3%, at least 2.4%, at least 2.5%, at least 2.6%, at least 2.7%, at least 2.8%, at least 2.9%, at least 3.0%, at least 3.1%, at least 3.2%, at least 3.3%, at least 3.4%, at least 3.5%, at least 3.6%, at least 3.7%, at least 3.8%, at least 3.9%, at least 4.0%, at least 4.1%, at least 4.2%, at least 4.3%, at least 4.4%, at least 4.5%, at least 4.6%, at least 4.7%, at least 4.8%, at least 4.9%, at least 5.0%, 5.1%, at least 5.2%, at least 5.3%, at least 5.4%, at least 5.5%, at least 5.6%, at least 5.7%, at least 5.8%, at least 5.9%, at least 6.0%, 6.1%, at least 6.2%, at least 6.3%, at least 6.4%, at least 6.5%, at least 6.6%, at least 6.7%, at least 6.8%, at least 6.9%, at least 7.0%, 7.1%, at least 8.2%, at least 8.3%, at least 8.4%, at least 8.5%, at least 8.6%, at least 8.7%, at least 8.8%, at least 8.9%, at least 9.0%, 9.1%, at least 9.2%, at least 9.3%, at least 9.4%, at least 9.5%, at least 1.6%, at least 9.7%, at least 9.8%, at least 9.9%, at least 10.0%, at least 15%, at least 20% or more.

[0720] In one embodiment, the reprogramming of a somatic cell, a precursor somatic cell, partially reprogrammed somatic cell, pluripotent cell, multipotent cell, differentiated cell or an embryonic cell into a pluripotent stem cell or its immediate precursor cell may cause an induction of at least one stem cell genes such as, but not limited to, DNMT3B, NANOG, OCT4, SSEA3, SSEA4, SOX2, REX1, TRA-1-60 and TRA-1-81.

[0721] In one embodiment, to reduce the stress response during the reprogramming of cells with the cell phenotype altering polynucleotides, primary constructs and/or mmRNA of the present invention encoding reprogramming factors a p53 inhibitor may be used to direct the cell toward reprogramming instead of apoptotic stimulus. Non-limiting examples of methods to enhance efficiency of translation are described in International Publication No. WO2011130624; herein incorporated by reference in its entirety.

[0722] In order to determine if the cell-altering polynucleotides, primary constructs and/or mmRNA of the present invention encoding reprogramming factors were able to induce pluripotent stem cells, testing of isolated clones can be done to determine the expression of an endogenous stem cell marker to identify the cell as an induced pluripotent stem cell. Stem cell markers include, but are not limited to, NAT1, SSEA1, UTF1, CD9, REX1, NANOG, SLC2A3, FBX15, ZPF296, ECAT1, ESG1, DAX1, CRIPTO, ERAS, GDF2 and FGF4. Methods for the detection of stem-cell markers are known in the art and may include reduction in or loss of lamin A/C protein expression detected by measuring an increase in acetylation or decrease in methylation, detection of chromatin remodeling to lead to the activation of an embryonic stem cell marker and the detection of the expression of stem cell markers by reverse transcription polymerase chain reaction (RT-PCR) and other immunological detection methods.

[0723] Additional information related to reprogramming of cells using RNA is described in International Publication No. WO2011130624; the contents of which is herein incorporated by reference in its entirety.

[0724] Cells transfected with the cell phenotype altering polynucleotides, primary constructs and/or mmRNA of the present invention encoding reprogramming factors may further be cultured with in the presence of cell specific growth factors such as, but not limited to, angiogenin, bone morphogenic protein-I, bone morphogenic protein-2, bone morphogenic protein-3, bone morphogenic protein-4, bone morphogenic protein-5, bone morphogenic protein-6, bone morphogenic protein-7, bone morphogenic protein-8, bone morphogenic protein-9, bone morphogenic protein-10, bone morphogenic protein-11, bone morphogenic protein-12, bone morphogenic protein-13, bone morphogenic protein-14, bone morphogenic protein-15, bone morphogenic protein receptor 1A, bone morphogenic protein receptor IB, brain derived neurotrophic factor, ciliary neutrophic factor, ciliary neutrophic factor receptor-alpha, cytokine-induced neutrophil chemotactic factor 1, cytokine-induced neutrophil, chemotactic factor 2-alpha, cytokine-induced neutrophil chemotactic factor 2-beta, betaendothelial cell growth factor, endothelia 1, epidermal growth factor, epithelial-derived neutrophil attractant, fibroblast growth factor 4, fibroblast growth factor 5, fibroblast growth factor 6 fibroblast growth factor 7, fibroblast growth factor 8, fibroblast growth factor b, fibroblast growth factor c, fibroblast growth factor 9, fibroblast growth factor 10, fibroblast growth factor acidic, fibroblast growth factor basic, glial cell line-derived neutrophil factor receptor-alpha-I, glial cell line-derived neutrophil factor receptor-alpha-2, growth related protein, growth related protein-alpha, growth related protein-beta, growth related protein-gamma, heparin binding epidermal growth factor, hepatocyte growth factor, hepatocyte growth factor receptor, insulin-like growth factor I, insulin-like growth factor receptor, insulin-like growth factor II, insulin-like growth factor binding protein, keratinocyte growth factor, leukemia inhibitory factor, leukemia inhibitory factor receptor-alpha, nerve growth factor, nerve growth factor receptor, neurotrophin-3, neurotrophin-4, placenta growth factor, placenta growth factor 2, platelet-derived endothelial cell growth factor, platelet derived growth factor, platelet derived growth factor A chain, platelet derived growth factor AA, platelet derived growth factor AB, platelet derived growth factor B chain, platelet derived growth factor BB, platelet derived growth factor receptor-alpha, platelet derived growth factor receptor-beta, pre-B cell growth stimulating factor, stem cell factor, stem cell factor receptor, transforming growth factor-alpha, transforming growth factor-beta, transforming growth factor-beta-I, transforming growth factor-beta-1-2, transforming growth factor-beta-2, transforming growth factor-beta-3, transforming growth factor-beta-5, latent transforming growth factor-beta-1, transforming growth factor-beta-binding protein I, transforming growth factor-beta-binding protein II, transforming growth factor-beta-binding protein III, tumor necrosis factor receptor type I, tumor necrosis factor receptor type II, urokinase-type plasminogen activator receptor, vascular endothelial growth factor, and chimeric proteins and biologically or immunologically active fragments thereof.

[0725] Cell may be transfected with ribonuclease inhibitors, such as, but not limited to B18R, TLR signaling inhibitors and PKR inhibitors, to reduce the innate immune response by inhibiting the activity and cellular binding.

### Differentiation and De-Differentiation of Cells

[0726] In one embodiment, the directing of the differentiation of cells may be accomplished by a single or repeated transfection of a cell with the cell phenotype altering polynucleotides, primary constructs and/or mmRNA of the present invention. The cell phenotype altering polynucleotides, primary constructs and/or mmRNA may encode differentiation or de-differentiation factors.

[0727] Cells may be transfected once or multiple times with the cell phenotype altering polynucleotides, primary constructs and/or mmRNA of the present invention encoding differentiation or de-differentiation factors in order to permit the desired expression of the differentiation or de-differentiation factors in cells being contacted. Repeated transfection can include, but is not limited to, at least one, at least two, at least three, at least four, at least five, at least six, at least seven, at least eight, at least nine, at least ten, at least fifteen, at least twenty, at least twenty five, at least thirty, at least thirty five or more transfections. The transfection of cells with the cell phenotype altering polynucleotides, primary constructs and/or mmRNA of the present invention encoding differentiation or de-differentiation factors may be repeated as many times as necessary to achieve the desired phenotype of the cell or population of cells contacted.

[0728] In one embodiment, transfection of cells with the cell phenotype altering polynucleotides, primary constructs and/or mmRNA of the present invention encoding differentiation or de-differentiation factors may produce pluripotent cells from a starting population of cells in less than 30 days, less than 29 days, less than 28 days, less than 27 days, less than 26 days, less than 25 days, less than 24 days, less than 23 days, less than 22 days, less than 21 days, less than 20 days, less than 19 days, less than 18 days, less than 17 days, less than 16 days, less than 15 days, less than 14 days, less than 13 days, less than 12 days, less than 11 days, less than 10 days, less than 9 days, less than 8 days, less than 7 days. In another embodiment, transfection of cells with the cell phenotype altering polynucleotides, primary constructs and/or mmRNA of the present invention encoding differentiation or de-differentiation factors may produce pluripotent cells from a starting population of cells in greater than 7 days.

[0729] In one embodiment, the gene expression of cell type specific markers can be measured by methods known in the art such as, but not limited to, Western blotting and cell function assays to determine if the transfection of the cell phenotype altering polynucleotides, primary constructs and/or mmRNA of the present invention encoding differentiation or de-differentiation factors has created the desired phenotype.

[0730] The efficiency of differentiation or de-differentiation of cells using the cell phenotype altering polynucleotides, primary constructs and/or mmRNA of the present invention encoding differentiation or de-differentiation factors to a pluripotent cell from a starting population of cells can be at least 1%, at least 1.2%, at least 1.4%, at least 1.6%, at least 1.8%, at least 2.1%, at least 2.2%, at least 2.3%, at least 2.4%, at least 2.5%, at least 2.6%, at least 2.7%, at least 2.8%, at least 2.9%, at least 3.0%, at least 3.1%, at least 3.2%, at least 3.3%, at least 3.4%, at least 3.5%, at least 3.6%, at least 3.7%, at least 3.8%, at least 3.9%, at least 4.0%, at least 4.1%, at least 4.2%, at least 4.3%, at least 4.4%, at least 4.5%, at least 4.6%, at least 4.7%, at least 4.8%, at least 4.9%, at least 5.0%, 5.1%, at least 5.2%, at least 5.3%, at least 5.4%, at least 5.5%, at least 5.6%, at least 5.7%, at least 5.8%, at least 5.9%, at least 6.0%, 6.1%, at least 6.2%, at least 6.3%, at least 6.4%, at least 6.5%, at least 6.6%, at least 6.7%, at least 6.8%, at least 6.9%, at least 7.0%, 7.1%, at least 8.2%, at least 8.3%, at least 8.4%, at least 8.5%, at least 8.6%, at least 8.7%, at least 8.8%, at least 8.9%, at least 9.0%, 9.1%, at least 9.2%, at least 9.3%, at least 9.4%, at least 9.5%, at least 1.6%, at least 9.7%, at least 9.8%, at least 9.9%, at least 10.0%, at least 15%, at least 20% or more.

[0731] As a non-limiting example, cell phenotype altering polynucleotides, primary constructs and/or mmRNA of the present invention encoding a neuronal differentiation factor such as ASC11, BRN2, MYT1 may be used to differentiate a cell into a neuronal cell phenotype. Other factors to promote differentiation and other information related to differentiation and de-differentiation of cells using RNA is described in International Publication No. WO2011130624; herein incorporated by reference in its entirety.

[0732] Cells transfected with the cell phenotype altering polynucleotides, primary constructs and/or mmRNA of the present invention encoding differentiation or de-differentation factors may further be cultured with in the presence of cell specific growth factors such as, but not limited to, angiogenin, bone morphogenic protein-I, bone morphogenic protein-2, bone morphogenic protein-3, bone morphogenic protein-4, bone morphogenic protein-5, bone morphogenic protein-6, bone morphogenic protein-7, bone morphogenic protein-8, bone morphogenic protein-9, bone morphogenic protein-10, bone morphogenic protein-11, bone morphogenic protein-12, bone morphogenic protein-13, bone morphogenic protein-14, bone morphogenic protein-15, bone morphogenic protein receptor 1A, bone morphogenic protein receptor IB, brain derived neurotrophic factor, ciliary neutrophic factor, ciliary neutrophic factor receptor-alpha, cytokine-induced neutrophil chemotactic factor 1, cytokine-induced neutrophil, chemotactic factor 2-alpha, cytokine-induced neutrophil chemotactic factor 2-beta, betaendothelial cell growth factor, endothelia 1, epidermal growth factor, epithelial-derived neutrophil attractant, fibroblast growth factor 4, fibroblast growth factor 5, fibroblast growth factor 6 fibroblast growth factor 7, fibroblast growth factor 8, fibroblast growth factor b, fibroblast growth factor c, fibroblast growth factor 9, fibroblast growth factor 10, fibroblast growth factor acidic, fibroblast growth factor basic, glial cell line-derived neutrophil factor receptor-alpha-I, glial cell line-derived neutrophil factor receptor-alpha-2, growth related protein, growth related protein-alpha, growth related protein-beta, growth related protein-gamma, heparin binding epidermal growth factor, hepatocyte growth factor, hepatocyte growth factor receptor, insulin-like growth factor I, insulin-like growth factor receptor, insulin-like growth factor II, insulin-like growth factor binding protein, keratinocyte growth factor, leukemia inhibitory factor, leukemia inhibitory factor receptor-alpha, nerve growth factor, nerve growth factor receptor, neurotrophin-3, neurotrophin-4, placenta growth factor, placenta growth factor 2, platelet-derived endothelial cell growth factor, platelet derived growth factor, platelet derived growth factor A chain, platelet derived growth factor AA, platelet derived growth factor AB, platelet derived growth factor B chain, platelet derived growth factor BB, platelet derived growth factor receptor-alpha, platelet derived growth factor receptor-beta, pre-B cell growth stimulating factor, stem cell factor, stem cell factor receptor, transforming growth factor-alpha, transforming growth factor-beta, transforming growth factor-beta-I, transforming growth factor-beta-1-2, transforming growth factor-beta-2, transforming growth factor-beta-3, transforming growth factor-beta-5, latent transforming growth factor-beta-1, transforming growth factor-beta-binding protein I, transforming growth factor-beta-binding protein II, transforming growth factor-beta-binding protein III, tumor necrosis factor receptor type I, tumor necrosis factor receptor type II, urokinase-type plasminogen activator receptor, vascular endothelial growth factor, and chimeric proteins and biologically or immunologically active fragments thereof.

### Transdifferentiation of Cells

[0733] The cell phenotype altering polynucleotides, primary constructs or mmRNA disclosed herein, may encode one or more differentiation factors which can be used in transdifferentiation. As used herein, a “transdifferentiation” refers the process of differentiated cells of one type to lose their identifying characteristics and change their phenotype to that of other fully differentiated cells. The cells may have been reprogramming before they are differentiated into another cell type but it is not required.

[0734] In one embodiment, the cell phenotype altering polynucleotides, primary constructs or mmRNA disclosed herein, may encode one or more differentiation factors to inhibit the expression of a cell type specific polypeptide of the starting cell which may be used to turn off the original phenotype of the cell. In another embodiment, the cell phenotype altering polynucleotides, primary constructs or mmRNA disclosed herein, may encode one or more differentiation factors of the desired cell to turn on the expression of a cell type specific polypeptide of the desired cell which is not part the original phenotype of the starting cell. In a further embodiment, the cell phenotype altering polynucleotides, primary constructs or mmRNA turning off the cell type specific polypeptide may be contacted at the same time, before and/or after the cell is contacted with a cell phenotype altering polynucleotides, primary constructs or mmRNA turning on the desired expression of a cell type specific polypeptide.

[0735] Other information relating to transdifferentiation with RNA is described in International Application No. WO2011130624; herein incorporated by reference in its entirety.

### Major Groove Interacting Partners

[0736] As described herein, the phrase “major groove interacting partner” refers to RNA recognition receptors that detect and respond to RNA ligands through interactions, e.g. binding, with the major groove face of a nucleotide or nucleic acid. As such, RNA ligands comprising modified nucleotides or nucleic acids such as the cell phenotype altering polynucleotide, primary construct or mmRNA as described herein decrease interactions with major groove binding partners, and therefore decrease an innate immune response.

[0737] Example major groove interacting, e.g. binding, partners include, but are not limited to the following nucleases and helicases. Within membranes, TLRs (Toll-like Receptors) 3, 7, and 8 can respond to single- and double-stranded RNAs. Within the cytoplasm, members of the superfamily 2 class of DEX(D/H) helicases and ATPases can sense RNAs to initiate antiviral responses. These helicases include the RIG-I (retinoic acid-inducible gene I) and MDA5 (melanoma differentiation-associated gene 5). Other examples include laboratory of genetics and physiology 2 (LGP2), HIN-200 domain containing proteins, or Helicase-domain containing proteins.

### Targeting of Pathogenic Organisms or Diseased Cells

[0738] Provided herein are methods for targeting pathogenic microorganisms, such as bacteria, yeast, protozoa, helminthes and the like, or diseased cells such as cancer cells using cell phenotype altering polynucleotides, primary constructs or mmRNA that encode cytostatic or cytotoxic polypeptides. Preferably the mRNA introduced contains modified nucleosides or other nucleic acid sequence modifications that are translated exclusively, or preferentially, in the target pathogenic organism, to reduce possible off-target effects of the therapeutic. Such methods are useful for removing pathogenic organisms or killing diseased cells found in any biological material, including blood, semen, eggs, and transplant materials including embryos, tissues, and organs.

### Bioprocessing

[0739] The methods provided herein may be useful for enhancing protein product yield in a cell culture process. In a cell culture containing a plurality of host cells, introduction of a cell phenotype altering polynucleotide, primary construct or mmRNA described herein results in increased protein production efficiency relative to a corresponding unmodified nucleic acid. Such increased protein production efficiency can be demonstrated, e.g., by showing increased cell transfection, increased cell phenotype altering protein translation from the cell phenotype altering polynucleotide, primary construct or mmRNA, decreased nucleic acid degradation, and/or reduced innate immune response of the host cell. Protein production can be measured by enzyme-linked immunosorbent assay (ELISA), and protein activity can be measured by various functional assays known in the art. The protein production may be generated in a continuous or a batch-fed mammalian process.

[0740] Additionally, it is useful to optimize the expression of a specific cell phenotype altering polypeptide in a cell line or collection of cell lines of potential interest, particularly a cell phenotype altering polypeptide of interest such as a protein variant of a reference cell phenotype altering protein having a known activity. In one embodiment, provided is a method of optimizing expression of a cell phenotype altering polypeptide of interest in a target cell, by providing a plurality of target cell types, and independently contacting with each of the plurality of target cell types a cell phenotype altering polynucleotide, primary construct or mmRNA encoding a cell phenotype altering polypeptide of interest. The cells may be transfected with two or more cell phenotype altering polynucleotide, primary construct or mmRNA simultaneously or sequentially.

[0741] In certain embodiments, multiple rounds of the methods described herein may be used to obtain cells with increased expression of one or more cell phenotype altering nucleic acids or cell phenotype altering proteins of interest. For example, cells may be transfected with one or more cell phenotype altering polynucleotide, primary construct or mmRNA that encode a cell phenotype altering nucleic acid or cell phenotype altering protein of interest. The cells may be isolated according to methods described herein before being subjected to further rounds of transfections with one or more other nucleic acids which encode a cell phenotype altering nucleic acid or cell phenotype altering protein of interest before being isolated again. This method may be useful for generating cells with increased expression of a complex of cell phenotype altering proteins, cell phenotype altering nucleic acids or cell phenotype altering proteins in the same or related biological pathway, cell phenotype altering nucleic acids or cell phenotype altering proteins that act upstream or downstream of each other, cell phenotype altering nucleic acids or cell phenotype altering proteins that have a modulating, activating or repressing function to each other, cell phenotype altering nucleic acids or cell phenotype altering proteins that are dependent on each other for function or activity, or cell phenotype altering nucleic acids or cell phenotype altering proteins that share homology.

[0742] Additionally, culture conditions may be altered to increase cell phenotype altering protein production efficiency. Subsequently, the presence and/or level of the cell phenotype altering polypeptide of interest in the plurality of target cell types is detected and/or quantitated, allowing for the optimization of a cell phenotype altering polypeptide's expression by selection of an efficient target cell and cell culture conditions relating thereto. Such methods are particularly useful when the cell phenotype altering polypeptide contains one or more post-translational modifications or has substantial tertiary structure, situations which often complicate efficient protein production.

[0743] In one embodiment, the cells used in the methods of the present invention may be cultured. The cells may be cultured in suspension or as adherent cultures. The cells may be cultured in a varied of vessels including, but not limited to, bioreactors, cell bags, wave bags, culture plates, flasks and other vessels well known to those of ordinary skill in the art. Cells may be cultured in IMDM (Invitrogen, Catalog number 12440-53) or any other suitable media including, but not limited to, chemically defined media formulations. The ambient conditions which may be suitable for cell culture, such as temperature and atmospheric composition, are well known to those skilled in the art. The methods of the invention may be used with any cell that is suitable for use in cell phenotype altering protein production.

[0744] The invention provides for the repeated introduction (e.g., transfection) of modified cell phenotype altering nucleic acids into a target cell population, e.g., in vitro, ex vivo, in situ, or in vivo. For example, contacting the same cell population may be repeated one or more times (such as two, three, four, five or more than five times). In some embodiments, the step of contacting the cell population with the cell phenotype altering polynucleotides, primary constructs or mmRNA is repeated a number of times sufficient such that a predetermined efficiency of cell phenotype altering protein translation in the cell population is achieved. Given the often reduced cytotoxicity of the target cell population provided by the nucleic acid modifications, repeated transfections are achievable in a diverse array of cell types and within a variety of tissues, as provided herein.

[0745] In some embodiments, the contacting step is repeated multiple times at a frequency selected from the group consisting of: 6 hr, 12 hr, 24 hr, 36 hr, 48 hr, 72 hr, 84 hr, 96 hr, and 108 hr and at concentrations of less than 20 nM, less than 50 nM, less than 80 nM or less than 100 nM. Compositions may also be administered at less than 1 mM, less than 5 mM, less than 10 mM, less than 100 mM or less than 500 mM.

[0746] In some embodiments, the cell phenotype altering polynucleotides, primary constructs or mmRNA are added at an amount of 50 molecules per cell, 100 molecules/cell, 200 molecules/cell, 300 molecules/cell, 400 molecules/cell, 500 molecules/cell, 600 molecules/cell, 700 molecules/cell, 800 molecules/cell, 900 molecules/cell, 1000 molecules/cell, 2000 molecules/cell, or 5000 molecules/cell.

[0747] In other embodiments, the cell phenotype altering polynucleotides, primary constructs or mmRNA are added at a concentration selected from the group consisting of: 0.01 fmol/106 cells, 0.1 fmol/106 cells, 0.5 fmol/106 cells, 0.75 fmol/106 cells, 1 fmol/106 cells, 2 fmol/106 cells, 5 fmol/106 cells, 10 fmol/106 cells, 20 fmol/106 cells, 30 fmol/106 cells, 40 fmol/106 cells, 50 fmol/106 cells, 60 fmol/106 cells, 100 fmol/106 cells, 200 fmol/106 cells, 300 fmol/106 cells, 400 fmol/106 cells, 500 fmol/106 cells, 700 fmol/106 cells, 800 fmol/106 cells, 900 fmol/106 cells, and 1 pmol/106 cells.

[0748] In some embodiments, the production of a biological product upon is detected by monitoring one or more measurable bioprocess parameters, such as a parameter selected from the group consisting of: cell density, pH, oxygen levels, glucose levels, lactic acid levels, temperature, and protein production. Protein production can be measured as specific productivity (SP) (the concentration of a product, such as a heterologously expressed polypeptide, in solution) and can be expressed as mg/L or g/L; in the alternative, specific productivity can be expressed as pg/cell/day. An increase in SP can refer to an absolute or relative increase in the concentration of a product produced under two defined set of conditions (e.g., when compared with controls not treated with modified cell phenotype altering mRNA(s)).

### Cells

[0749] In one embodiment, the cells are selected from the group consisting of mammalian cells, bacterial cells, plant, microbial, algal and fungal cells. In some embodiments, the cells are mammalian cells, such as, but not limited to, human, mouse, rat, goat, horse, rabbit, hamster or cow cells. In a further embodiment, the cells may be from an established cell line, including, but not limited to, HeLa, NSO, SP2/0, KEK 293T, Vero, Caco, Caco-2, MDCK, COS-1, COS-7, K562, Jurkat, CHO-K1, DG44, CHOK1SV, CHO—S, Huvec, CV-1, Huh-7, NIH3T3, HEK293, 293, A549, HepG2, IMR-90, MCF-7, U-20S, Per.C6, SF9, SF21 or Chinese Hamster Ovary (CHO) cells.

[0750] In certain embodiments, the cells are fungal cells, such as, but not limited to, Chrysosporium cells, Aspergillus cells, Trichoderma cells, Dictyostelium cells, Candida cells, Saccharomyces cells, Schizosaccharomyces cells, and Penicillium cells.

[0751] In certain embodiments, the cells are bacterial cells such as, but not limited to, E. coli, B. subtilis, or BL21 cells. Primary and secondary cells to be transfected by the methods of the invention can be obtained from a variety of tissues and include, but are not limited to, all cell types which can be maintained in culture. For examples, primary and secondary cells which can be transfected by the methods of the invention include, but are not limited to, fibroblasts, keratinocytes, epithelial cells (e.g., mammary epithelial cells, intestinal epithelial cells), endothelial cells, glial cells, neural cells, formed elements of the blood (e.g., lymphocytes, bone marrow cells), muscle cells and precursors of these somatic cell types. Primary cells may also be obtained from a donor of the same species or from another species (e.g., mouse, rat, rabbit, cat, dog, pig, cow, bird, sheep, goat, horse).

[0752] In one embodiment, the cells used in the present invention are somatic cells. Almost any primary somatic cell type can be used to prepare cells with an altered phenotype or altered developmental potential. A primary somatic cell may include, but is not limited to, fibroblast, epithelial, endothelial, neuronal, adipose, cardiac, skeletal muscle, immune cells, hepatic, splenic, lung, circulating blood cells, gastrointestinal, renal, bone marrow and pancreatic cells. Further, a primary somatic cell may be isolated from somatic tissue such as, but not limited to, brain, liver, lung, gut, stomach, intestine, fat, muscle, uterus, skin, spleen, endocrine organ, and bone.

[0753] In one embodiment, the cells of the present invention are stem cells. Stem cells are classified by their development potention to be totipotent, pluripotent, multipotent, oligopotent and unipotent. The stem cells may be adult stem cells or derived from embryonic sources. Cell phenotype altering polynucleotides, primary constructs and mmRNA may be used to generate a stem cell from a differentiated cell. Further, the cell phenotype altering polynucleotides, primary constructs and mmRNA of the present invention may be used to direct the differentiation of the stem cell to one or more desired cell types. Stem cells are described in International Publication No. WO2011130624, U.S. Pat. Nos. 5,750,376, 5,851,832, 5,753,506, 5,589,379, 5,824,489, 5,654,183, 5,693,482, 5,672,499 and 5,849,553; each of which is incorporated by reference in its entirety.

[0754] In one embodiment, the cells are cancer stem cells. The cell phenotype altering polynucleotides, primary constructs and mmRNA of the present invention may be used to alter the phenotype of a cancer stem cell to a non-tumorigenic state. Non-limiting examples of tumors form which samples containing cancer stem cells can be isolated from or enriched for use with the present invention include sarcomas and carcinomas such as, but not limited to, fibrosarcoma, myxosarcoma, liposarcoma, chondrosarcoma, osteogenic sarcoma, chordoma, angiosarcoma, endotheliosarcoma, lymphangiosarcoma, mesothelioma, Ewing's tumor, lymphangioendotheliosarcoma, synovioma, leiomyosarcoma, rhabdomyosarcoma, colon carcinoma, pancreatic cancer, breast cancer, ovarian cancer, prostate cancer, squamous cell carcinoma, basal cell carcinoma, adenocarcinoma, sweat gland carcinoma, sebaceous gland carcinoma, papillary carcinoma, papillary adenocarcinomas, cystadenocarcinoma, medullary carcinoma, bronchogenic carcinoma, renal cell carcinoma, hepatoma, bile duct carcinoma, choriocarcinoma, seminoma, embryonal carcinoma, Wilms' tumor, cervical cancer, testicular tumor, lung carcinoma, small cell lung carcinoma, bladder carcinoma, epithelial carcinoma, astrocytic tumors (e.g., diffuse, infiltrating gliomas, anaplastic astrocytoma, glioblastoma, gliosarcoma, pilocytic astrocytoma, pleomorphic xanthoastrocytoma), oligodendroglia! tumors and mixed gliomas (e.g., oligodendroglioma, anaplastic oligodendroglioma, oligoastrocytoma, anaplastic oligoastrocytoma), ependymal tumors (e.g., ependymoma, anaplastic ependymoma, myxopapillary ependymoma, subependymoma), choroid plexus tumors, neuroepithelial tumors of uncertain origin (astroblastoma, chordoid glioma, gliomatosis cerebri), neuronal and mixed-neuronal-glial tumors (e.g., ganglioglioma and gangliocytoma, desmoplastic infantile astrocytoma and ganglioglioma, dysembryoplastic neuroepithelial tumor, central neurocytoma, cerebellar liponeurocytoma, paraganglioglioma), pineal parenchymal tumors, embryonal tumors (medulloepithelioma, ependymoblastoma, medulloblastoma, primitive neuroectodemmal tumor, atypical teratoid/rhabdoid tumor), peripheral neuroblastic tumors, tumors of cranial and peripheral nerves (e.g., schwannoma, neurinofibroma, perineurioma, malignant peripheral nerve sheath tumor), meningeal tumors (e.g., meningeomas, mesenchymal, nonmeningothelial tumors, haemangiopericytomas, melanocytic lesions), germ cell tumors, tumors of the sellar region (e.g., craniopharyngioma, granular cell tumor of the neurohypophysis), hemangioblastoma, melanoma, and retinoblastoma.

### Purification and Isolation

[0755] Those of ordinary skill in the art should be able to make a determination of the methods to use to purify or isolate of a cell phenotype altering protein of interest from cultured cells. Generally, this is done through a capture method using affinity binding or non-affinity purification. If the cell phenotype altering protein of interest is not secreted by the cultured cells, then a lysis of the cultured cells should be performed prior to purification or isolation. One may use unclarified cell culture fluid containing the cell phenotype altering protein of interest along with cell culture media components as well as cell culture additives, such as anti-foam compounds and other nutrients and supplements, cells, cellular debris, host cell proteins, DNA, viruses and the like in the present invention. The process may be conducted in the bioreactor itself. The fluid may either be preconditioned to a desired stimulus such as pH, temperature or other stimulus characteristic or the fluid can be conditioned upon the addition of polymer(s) or the polymer(s) can be added to a carrier liquid that is properly conditioned to the required parameter for the stimulus condition required for that polymer to be solubilized in the fluid. The polymer may be allowed to circulate thoroughly with the fluid and then the stimulus may be applied (change in pH, temperature, salt concentration, etc) and the desired cell phenotype altering protein and polymer(s) precipitate can out of the solution. The polymer and the desired cell phenotype altering protein(s) can be separated from the rest of the fluid and optionally washed one or more times to remove any trapped or loosely bound contaminants. The desired cell phenotype altering protein may then be recovered from the polymer(s) by, for example, elution and the like. Preferably, the elution may be done under a set of conditions such that the polymer remains in its precipitated form and retains any impurities to it during the selected elution of the desired cell phenotype altering protein. The polymer and cell phenotype altering protein as well as any impurities may be solubilized in a new fluid such as water or a buffered solution and the cell phenotype altering protein may be recovered by a means such as affinity, ion exchanged, hydrophobic, or some other type of chromatography that has a preference and selectivity for the protein over that of the polymer or impurities. The eluted protein may then be recovered and may be subjected to additional processing steps, either batch like steps or continuous flow through steps if appropriate.

[0756] In another embodiment, it may be useful to optimize the expression of a specific cell phenotype altering polypeptide in a cell line or collection of cell lines of potential interest, particularly a cell phenotype altering polypeptide of interest such as a protein variant of a reference cell phenotype altering protein having a known activity. In one embodiment, provided is a method of optimizing expression of a cell phenotype altering polypeptide of interest in a target cell, by providing a plurality of target cell types, and independently contacting with each of the plurality of target cell types a modified cell phenotype altering mRNA encoding a polypeptide. Additionally, culture conditions may be altered to increase protein production efficiency. Subsequently, the presence and/or level of the cell phenotype altering polypeptide of interest in the plurality of target cell types is detected and/or quantitated, allowing for the optimization of a cell phenotype altering polypeptide of interest's expression by selection of an efficient target cell and cell culture conditions relating thereto. Such methods may be useful when the cell phenotype altering polypeptide of interest contains one or more post-translational modifications or has substantial tertiary structure, which often complicate efficient protein production.

### Protein Recovery

[0757] The cell phenotype altering protein of interest may be preferably recovered from the culture medium as a secreted polypeptide, or it can be recovered from host cell lysates if expressed without a secretory signal. It may be necessary to purify the cell phenotype altering protein of interest from other recombinant proteins and host cell proteins in a way that substantially homogenous preparations of the cell phenotype altering protein of interest are obtained. The cells and/or particulate cell debris may be removed from the culture medium or lysate. The cell phenotype altering product of interest may then be purified from contaminant soluble reprogramming proteins, polypeptides and nucleic acids by, for example, fractionation on immunoaffinity or ion-exchange columns, ethanol precipitation, reverse phase HPLC (RP-HPLC), SEPHADEX® chromatography, chromatography on silica or on a cation exchange resin such as DEAE. Methods of purifying a protein heterologous expressed by a host cell are well known in the art.

[0758] Methods and compositions described herein may be used to produce cell phenotype altering proteins which are capable of attenuating or blocking the endogenous agonist biological response and/or antagonizing a receptor or signaling molecule in a mammalian subject. For example, IL-12 and IL-23 receptor signaling may be enhanced in chronic autoimmune disorders such as multiple sclerosis and inflammatory diseases such as rheumatoid arthritis, psoriasis, lupus erythematosus, ankylosing spondylitis and Chron's disease (Kikly K, Liu L, Na S, Sedgwich J D (2006) Cur. Opin. Immunol. 18(6): 670-5). In another embodiment, a cell phenotype altering nucleic acid encodes an antagonist for chemokine receptors. Chemokine receptors CXCR-4 and CCR-5 are required for HIV enry into host cells (Arenzana-Seisdedos F et al, (1996) Nature. October 3; 383 (6599):400).

### Gene Silencing

[0759] The cell phenotype altering polynucleotides, primary constructs and mmRNA described herein are useful to silence (i.e., prevent or substantially reduce) expression of one or more target genes in a cell population. A cell phenotype altering polynucleotide, primary construct or mmRNA encoding a cell phenotype altering polypeptide of interest capable of directing sequence-specific histone H3 methylation is introduced into the cells in the population under conditions such that the polypeptide is translated and reduces gene transcription of a target gene via histone H3 methylation and subsequent heterochromatin formation. In some embodiments, the silencing mechanism is performed on a cell population present in a mammalian subject. By way of non-limiting example, a useful target gene is a mutated Janus Kinase-2 family member, wherein the mammalian subject expresses the mutant target gene suffers from a myeloproliferative disease resulting from aberrant kinase activity.

[0760] Co-administration of cell phenotype altering polynucleotides, primary constructs and mmRNA and RNAi agents are also provided herein.

### Modulation of Biological Pathways

[0761] The rapid translation cell phenotype altering polynucleotides, primary constructs and mmRNA introduced into cells provides a desirable mechanism of modulating target biological pathways. Such modulation includes antagonism or agonism of a given pathway. In one embodiment, a method is provided for antagonizing a biological pathway in a cell by contacting the cell with an effective amount of a composition comprising a cell phenotype altering polynucleotide, primary construct or mmRNA encoding a polypeptide of interest, under conditions such that the cell phenotype altering polynucleotides, primary constructs and mmRNA is localized into the cell and the polypeptide is capable of being translated in the cell from the cell phenotype altering polynucleotides, primary constructs and mmRNA, wherein the cell phenotype altering polypeptide inhibits the activity of a polypeptide functional in the biological pathway. Exemplary biological pathways are those defective in an autoimmune or inflammatory disorder such as multiple sclerosis, rheumatoid arthritis, psoriasis, lupus erythematosus, ankylosing spondylitis colitis, or Crohn's disease; in particular, antagonism of the IL-12 and IL-23 signaling pathways are of particular utility. (See Kikly K, Liu L, Na S, Sedgwick J D (2006) Curr. Opin. Immunol. 18 (6): 670-5).

[0762] Further, provided are cell phenotype altering polynucleotide, primary construct or mmRNA encoding an antagonist for chemokine receptors; chemokine receptors CXCR-4 and CCR-5 are required for, e.g., HIV entry into host cells (Arenzana-Seisdedos F et al, (1996) Nature, October 3; 383(6599):400).

[0763] Alternatively, provided are methods of agonizing a biological pathway in a cell by contacting the cell with an effective amount of a cell phenotype altering polynucleotide, primary construct or mmRNA encoding a recombinant polypeptide under conditions such that the nucleic acid is localized into the cell and the recombinant polypeptide is capable of being translated in the cell from the nucleic acid, and the recombinant polypeptide induces the activity of a cell phenotype altering polypeptide functional in the biological pathway. Exemplary agonized biological pathways include pathways that modulate cell fate determination. Such agonization is reversible or, alternatively, irreversible.

### Expression of Ligand or Receptor on Cell Surface

[0764] In some aspects and embodiments of the aspects described herein, the cell phenotype altering polynucleotides, primary constructs or mmRNA described herein can be used to express a ligand or ligand receptor on the surface of a cell (e.g., a homing moiety). A ligand or ligand receptor moiety attached to a cell surface can permit the cell to have a desired biological interaction with a tissue or an agent in vivo. A ligand can be an antibody, an antibody fragment, an aptamer, a peptide, a vitamin, a carbohydrate, a protein or polypeptide, a receptor, e.g., cell-surface receptor, an adhesion molecule, a glycoprotein, a sugar residue, a therapeutic agent, a drug, a glycosaminoglycan, or any combination thereof. For example, a ligand can be an antibody that recognizes a cancer-cell specific antigen, rendering the cell capable of preferentially interacting with tumor cells to permit tumor-specific localization of a modified cell. A ligand can confer the ability of a cell composition to accumulate in a tissue to be treated, since a preferred ligand may be capable of interacting with a target molecule on the external face of a tissue to be treated. Ligands having limited cross-reactivity to other tissues are generally preferred.

[0765] In some cases, a ligand can act as a homing moiety which permits the cell to target to a specific tissue or interact with a specific ligand. Such homing moieties can include, but are not limited to, any member of a specific binding pair, antibodies, monoclonal antibodies, or derivatives or analogs thereof, including without limitation: Fv fragments, single chain Fv (scFv) fragments, Fab′ fragments, F(ab′)2 fragments, single domain antibodies, camelized antibodies and antibody fragments, humanized antibodies and antibody fragments, and multivalent versions of the foregoing; multivalent binding reagents including without limitation: monospecific or bispecific antibodies, such as disulfide stabilized Fv fragments, scFv tandems ((SCFV)2 fragments), diabodies, tribodies or tetrabodies, which typically are covalently linked or otherwise stabilized (i.e., leucine zipper or helix stabilized) scFv fragments; and other homing moieties include for example, aptamers, receptors, and fusion proteins.

[0766] In some embodiments, the homing moiety may be a surface-bound antibody, which can permit tuning of cell targeting specificity. This is especially useful since highly specific antibodies can be raised against an epitope of interest for the desired targeting site. In one embodiment, multiple antibodies are expressed on the surface of a cell, and each antibody can have a different specificity for a desired target. Such approaches can increase the avidity and specificity of homing interactions.

[0767] A skilled artisan can select any homing moiety based on the desired localization or function of the cell, for example an estrogen receptor ligand, such as tamoxifen, can target cells to estrogen-dependent breast cancer cells that have an increased number of estrogen receptors on the cell surface. Other non-limiting examples of ligand/receptor interactions include CCRI (e.g., for treatment of inflamed joint tissues or brain in rheumatoid arthritis, and/or multiple sclerosis), CCR7, CCR8 (e.g., targeting to lymph node tissue), CCR6, CCR9, CCR10 (e.g., to target to intestinal tissue), CCR4, CCR10 (e.g., for targeting to skin), CXCR4 (e.g., for general enhanced transmigration), HCELL (e.g., for treatment of inflammation and inflammatory disorders, bone marrow), Alpha4beta7 (e.g., for intestinal mucosa targeting), VLA-4/VCAM-1 z (e.g., targeting to endothelium). In general, any receptor involved in targeting (e.g., cancer metastasis) can be harnessed for use in the methods and compositions described herein.

### Modulation of Cell Lineage

[0768] Provided are methods of inducing an alteration in cell fate in a target mammalian cell. The target mammalian cell may be a precursor cell and the alteration may involve driving differentiation into a lineage, or blocking such differentiation. Alternatively, the target mammalian cell may be a differentiated cell, and the cell fate alteration includes driving de-differentiation into a pluripotent precursor cell, or blocking such de-differentiation, such as the dedifferentiation of cancer cells into cancer stem cells. In situations where a change in cell fate is desired, effective amounts of cell phenotype altering mRNAs encoding a cell fate inductive polypeptide is introduced into a target cell under conditions such that an alteration in cell fate is induced. In some embodiments, the modified cell phenotype altering mRNAs are useful to reprogram a subpopulation of cells from a first phenotype to a second phenotype. Such a cell phenotype altering may be temporary or permanent. Optionally, the cell phenotype altering induces a target cell to adopt an intermediate phenotype.

[0769] In one embodiment, the methods and compositions of the present invention are particularly useful to generate induced pluripotent stem cells (iPS cells). The cell phenotype altering polynucleotides, primary constructs and/or mmRNA can have a high efficiency of transfection, the ability to re-transfect cells, and the tenability of the amount of recombinant polypeptides produced in the target cells. Further, the use of iPS cells generated using the cell phenotype altering polynucleotides, primary constructs and/or mmRNA and methods described herein is expected to have a reduced incidence of teratoma formation.

[0770] Also provided herein are methods to reduce cellular differentiation in a target cell population using cell phenotype altering polynucleotides, primary constructs and/or mmRNA which may encode differentiation or de-differentiation factors. For example, a target cell population containing one or more precursor cell types may be contacted with a composition of the present invention having an effective amount of a cell phenotype altering polynucleotides, primary constructs and mmRNA encoding a cell phenotype altering polypeptide, under conditions such that the cell phenotype altering polypeptide is translated and reduces the differentiation of the precursor cell. In non-limiting embodiments, the target cell population contains injured tissue in a mammalian subject or tissue affected by a surgical procedure. The precursor cell is, e.g., a stromal precursor cell, a neural precursor cell, or a mesenchymal precursor cell.

[0771] In a specific embodiment, provided are cell phenotype altering polynucleotide, primary construct or mmRNA that encode one or more differentiation factors GATA4, MEF2C and TBX4. These mRNA-generated factors can be introduced into fibroblasts and drive the reprogramming into cardiomyocytes. Such a reprogramming can be performed in vivo, by contacting an mRNA-containing patch or other material to damaged cardiac tissue to facilitate cardiac regeneration. Such a process promotes cardiomyocyte genesis as opposed to fibrosis.

### Mediation of Cell Death

[0772] In one embodiment, cell phenotype altering polynucleotides, primary constructs or mmRNA compositions can be used to induce apoptosis in a cell (e.g., a cancer cell) by increasing the expression of a death receptor, a death receptor ligand or a combination thereof. This method can be used to induce cell death in any desired cell and has particular usefulness in the treatment of cancer where cells escape natural apoptotic signals.

[0773] Apoptosis can be induced by multiple independent signaling pathways that converge upon a final effector mechanism consisting of multiple interactions between several “death receptors” and their ligands, which belong to the tumor necrosis factor (TNF) receptor/ligand superfamily. The best-characterized death receptors are CD95 (“Fas”), TNFRI (p55), death receptor 3 (DR3 or Apo3/TRAMO), DR4 and DR5 (apo2-TRAIL-R2). The final effector mechanism of apoptosis may be the activation of a series of proteinases designated as caspases. The activation of these caspases results in the cleavage of a series of vital cellular proteins and cell death. The molecular mechanism of death receptors/ligands-induced apoptosis is well known in the art. For example, Fas/FasL-mediated apoptosis is induced by binding of three FasL molecules which induces trimerization of Fas receptor via C-terminus death domains (DDs), which in turn recruits an adapter protein FADD (Fas-associated protein with death domain) and Caspase-8. The oligomerization of this trimolecular complex, Fas/FAIDD/caspase-8, results in proteolytic cleavage of proenzyme caspase-8 into active caspase-8 that, in turn, initiates the apoptosis process by activating other downstream caspases through proteolysis, including caspase-3. Death ligands in general are apoptotic when formed into trimers or higher order of structures. As monomers, they may serve as antiapoptotic agents by competing with the trimers for binding to the death receptors.

[0774] In one embodiment, the cell phenotype altering polynucleotides, primary constructs or mmRNA composition encodes for a death receptor (e.g., Fas, TRAIL, TRAMO, TNFR, TLR etc). Cells made to express a death receptor by transfection of cell phenotype altering polynucleotides, primary constructs and mmRNA become susceptible to death induced by the ligand that activates that receptor. Similarly, cells made to express a death ligand, e.g., on their surface, will induce death of cells with the receptor when the transfected cell contacts the target cell. In another embodiment, the polynucleotides, primary constructs and mmRNA composition encodes for a death receptor ligand (e.g., FasL, TNF, etc). In another embodiment, the polynucleotides, primary constructs and mmRNA composition encodes a caspase (e.g., caspase 3, caspase 8, caspase 9 etc). Where cancer cells often exhibit a failure to properly differentiate to a non-proliferative or controlled proliferative form, in another embodiment, the synthetic, cell phenotype altering polynucleotides, primary constructs and mmRNA composition encodes for both a death receptor and its appropriate activating ligand. In another embodiment, the synthetic, cell phenotype altering polynucleotides, primary constructs and mmRNA composition encodes for a differentiation factor that when expressed in the cancer cell, such as a cancer stem cell, will induce the cell to differentiate to a non-pathogenic or nonself-renewing phenotype (e.g., reduced cell growth rate, reduced cell division etc) or to induce the cell to enter a dormant cell phase (e.g., Go resting phase).

[0775] One of skill in the art will appreciate that the use of apoptosis-inducing techniques may require that the cell phenotype altering polynucleotides, primary constructs or mmRNA are appropriately targeted to e.g., tumor cells to prevent unwanted wide-spread cell death. Thus, one can use a delivery mechanism (e.g., attached ligand or antibody, targeted liposome etc) that recognizes a cancer antigen such that the cell phenotype altering polynucleotides, primary constructs or mmRNA are expressed only in cancer cells.

### VI. KITS AND DEVICES

### Kits

[0776] The invention provides a variety of kits for conveniently and/or effectively carrying out methods of the present invention. Typically kits will comprise sufficient amounts and/or numbers of components to allow a user to perform multiple treatments of a subject(s) and/or to perform multiple experiments, and contact cells and/or a population of cells at least once.

[0777] In one aspect, the present invention provides kits comprising the molecules (cell phenotype altering polynucleotides, primary constructs or mmRNA) of the invention. In one embodiment, the kit comprises one or more functional antibodies or function fragments thereof.

[0778] Said kits can be for cell phenotype altering protein production, comprising a first cell phenotype altering polynucleotide, primary construct or mmRNA comprising a translatable region. The kit may further comprise packaging and instructions and/or a delivery agent to form a formulation composition. The delivery agent may comprise a saline, a buffered solution, a lipidoid or any delivery agent disclosed herein.

[0779] In one embodiment, the buffer solution may include sodium chloride, calcium chloride, phosphate and/or EDTA. In another embodiment, the buffer solution may include, but is not limited to, saline, saline with 2 mM calcium, 5% sucrose, 5% sucrose with 2 mM calcium, 5% Mannitol, 5% Mannitol with 2 mM calcium, Ringer's lactate, sodium chloride, sodium chloride with 2 mM calcium. In a further embodiment, the buffer solutions may be precipitated or it may be lyophilized. The amount of each component may be varied to enable consistent, reproducible higher concentration saline or simple buffer formulations. The components may also be varied in order to increase the stability of modified cell phenotype altering RNA in the buffer solution over a period of time and/or under a variety of conditions. In one aspect, the present invention provides kits for protein production, comprising: a cell phenotype altering polynucleotide, primary construct or mmRNA comprising a translatable region, provided in an amount effective to produce a desired amount of a cell phenotype altering protein encoded by the translatable region when introduced into a target cell; a second polynucleotide comprising an inhibitory nucleic acid, provided in an amount effective to substantially inhibit the innate immune response of the cell; and packaging and instructions.

[0780] In one aspect, the present invention provides kits for cell phenotype altering protein production, comprising a cell phenotype altering polynucleotide, primary construct or mmRNA comprising a translatable region, wherein the polynucleotide exhibits reduced degradation by a cellular nuclease, and packaging and instructions.

[0781] In one aspect, the present invention provides kits for protein production, comprising a cell phenotype altering polynucleotide, primary construct or mmRNA comprising a translatable region, wherein the polynucleotide exhibits reduced degradation by a cellular nuclease, and a mammalian cell suitable for translation of the translatable region of the first nucleic acid.

### Devices

[0782] The present invention provides for devices which may incorporate cell phenotype altering polynucleotides, primary constructs or mmRNA that encode cell phenotype altering polypeptides of interest. These devices contain in a stable formulation the reagents to synthesize a cell phenotype altering polynucleotide in a formulation available to be immediately delivered to a subject in need thereof, such as a human patient. Non-limiting examples of such a cell phenotype altering polypeptide of interest include reprogramming factors, differentiation factors and de-differentiation factors.

[0783] In some embodiments the device is self-contained, and is optionally capable of wireless remote access to obtain instructions for synthesis and/or analysis of the generated cell phenotype altering polynucleotide, primary construct or mmRNA. The device is capable of mobile synthesis of at least one cell phenotype altering polynucleotide, primary construct or mmRNA and preferably an unlimited number of different cell phenotype altering polynucleotides, primary constructs or mmRNA. In certain embodiments, the device is capable of being transported by one or a small number of individuals. In other embodiments, the device is scaled to fit on a benchtop or desk. In other embodiments, the device is scaled to fit into a suitcase, backpack or similarly sized object. In another embodiment, the device may be a point of care or handheld device. In further embodiments, the device is scaled to fit into a vehicle, such as a car, truck or ambulance, or a military vehicle such as a tank or personnel carrier. The information necessary to generate a modified cell phenotype altering mRNA encoding a cell phenotype altering polypeptide of interest is present within a computer readable medium present in the device.

[0784] In one embodiment, a device may be used to assess levels of a protein which has been administered in the form of a cell phenotype altering polynucleotide, primary construct or mmRNA. The device may comprise a blood, urine or other biofluidic test.

[0785] In some embodiments, the device is capable of communication (e.g., wireless communication) with a database of nucleic acid and polypeptide sequences. The device contains at least one sample block for insertion of one or more sample vessels. Such sample vessels are capable of accepting in liquid or other form any number of materials such as template DNA, nucleotides, enzymes, buffers, and other reagents. The sample vessels are also capable of being heated and cooled by contact with the sample block. The sample block is generally in communication with a device base with one or more electronic control units for the at least one sample block. The sample block preferably contains a heating module, such heating molecule capable of heating and/or cooling the sample vessels and contents thereof to temperatures between about −20 C and above +100 C. The device base is in communication with a voltage supply such as a battery or external voltage supply. The device also contains means for storing and distributing the materials for RNA synthesis.

[0786] Optionally, the sample block contains a module for separating the synthesized cell phenotype altering nucleic acids. Alternatively, the device contains a separation module operably linked to the sample block. Preferably the device contains a means for analysis of the synthesized cell phenotype altering nucleic acid. Such analysis includes sequence identity (demonstrated such as by hybridization), absence of non-desired sequences, measurement of integrity of synthesized cell phenotype altering mRNA (such has by microfluidic viscometry combined with spectrophotometry), and concentration and/or potency of modified cell phenotype altering RNA (such as by spectrophotometry).

[0787] In certain embodiments, the device is combined with a means for detection of pathogens present in a biological material obtained from a subject, e.g., the IBIS PLEX-ID system (Abbott, Abbott Park, Ill.) for microbial identification.

[0788] Suitable devices for use in delivering intradermal pharmaceutical compositions described herein include short needle devices such as those described in U.S. Pat. Nos. 4,886,499; 5,190,521; 5,328,483; 5,527,288; 4,270,537; 5,015,235; 5,141,496; and 5,417,662. Intradermal compositions may be administered by devices which limit the effective penetration length of a needle into the skin, such as those described in PCT publication WO 99/34850 and functional equivalents thereof. Jet injection devices which deliver liquid compositions to the dermis via a liquid jet injector and/or via a needle which pierces the stratum corneum and produces a jet which reaches the dermis are suitable. Jet injection devices are described, for example, in U.S. Pat. Nos. 5,480,381; 5,599,302; 5,334,144; 5,993,412; 5,649,912; 5,569,189; 5,704,911; 5,383,851; 5,893,397; 5,466,220; 5,339,163; 5,312,335; 5,503,627; 5,064,413; 5,520,639; 4,596,556; 4,790,824; 4,941,880; 4,940,460; and PCT publications WO 97/37705 and WO 97/13537. Ballistic powder/particle delivery devices which use compressed gas to accelerate vaccine in powder form through the outer layers of the skin to the dermis are suitable. Alternatively or additionally, conventional syringes may be used in the classical mantoux method of intradermal administration.

[0789] In some embodiments, the device may be a pump or comprise a catheter for administration of compounds or compositions of the invention across the blood brain barrier. Such devices include but are not limited to a pressurized olfactory delivery device, iontophoresis devices, multi-layered microfluidic devices, and the like. Such devices may be portable or stationary. They may be implantable or externally tethered to the body or combinations thereof.

[0790] Devices for administration may be employed to deliver the cell phenotype altering polynucleotides, primary constructs or mmRNA of the present invention according to single, multi- or split-dosing regimens taught herein. Such devices are described below.

[0791] Method and devices known in the art for multi-administration to cells, organs and tissues are contemplated for use in conjunction with the methods and compositions disclosed herein as embodiments of the present invention. These include, for example, those methods and devices having multiple needles, hybrid devices employing for example lumens or catheters as well as devices utilizing heat, electric current or radiation driven mechanisms.

[0792] According to the present invention, these multi-administration devices may be utilized to deliver the single, multi- or split doses contemplated herein.

[0793] A method for delivering therapeutic agents to a solid tissue has been described by Bahrami et al. and is taught for example in US Patent Publication 20110230839, the contents of which are incorporated herein by reference in their entirety. According to Bahrami, an array of needles is incorporated into a device which delivers a substantially equal amount of fluid at any location in said solid tissue along each needle's length.

[0794] A device for delivery of biological material across the biological tissue has been described by Kodgule et al. and is taught for example in US Patent Publication 20110172610, the contents of which are incorporated herein by reference in their entirety. According to Kodgule, multiple hollow micro-needles made of one or more metals and having outer diameters from about 200 microns to about 350 microns and lengths of at least 100 microns are incorporated into the device which delivers peptides, proteins, carbohydrates, nucleic acid molecules, lipids and other pharmaceutically active ingredients or combinations thereof.

[0795] A delivery probe for delivering a therapeutic agent to a tissue has been described by Gunday et al. and is taught for example in US Patent Publication 20110270184, the contents of which are incorporated herein by reference in their entirety. According to Gunday, multiple needles are incorporated into the device which moves the attached capsules between an activated position and an inactivated position to force the agent out of the capsules through the needles.

[0796] A multiple-injection medical apparatus has been described by Assaf and is taught for example in US Patent Publication 20110218497, the contents of which are incorporated herein by reference in their entirety. According to Assaf, multiple needles are incorporated into the device which has a chamber connected to one or more of said needles and a means for continuously refilling the chamber with the medical fluid after each injection.

[0797] In one embodiment, the cell phenotype altering polynucleotide, primary construct, or mmRNA is administered subcutaneously or intramuscularly via at least 3 needles to three different, optionally adjacent, sites simultaneously, or within a 60 minutes period (e.g., administration to 4, 5, 6, 7, 8, 9, or 10 sites simultaneously or within a 60 minute period). The split doses can be administered simultaneously to adjacent tissue using the devices described in U.S. Patent Publication Nos. 20110230839 and 20110218497, each of which is incorporated herein by reference.

[0798] An at least partially implantable system for injecting a substance into a patient's body, in particular a penis erection stimulation system has been described by Forsell and is taught for example in US Patent Publication 20110196198, the contents of which are incorporated herein by reference in their entirety. According to Forsell, multiple needles are incorporated into the device which is implanted along with one or more housings adjacent the patient's left and right corpora cavernosa. A reservoir and a pump are also implanted to supply drugs through the needles.

[0799] A method for the transdermal delivery of a therapeutic effective amount of iron has been described by Berenson and is taught for example in US Patent Publication 20100130910, the contents of which are incorporated herein by reference in their entirety. According to Berenson, multiple needles may be used to create multiple micro channels in stratum corneum to enhance transdermal delivery of the ionic iron on an iontophoretic patch.

[0800] A method for delivery of biological material across the biological tissue has been described by Kodgule et al and is taught for example in US Patent Publication 20110196308, the contents of which are incorporated herein by reference in their entirety. According to Kodgule, multiple biodegradable microneedles containing a therapeutic active ingredient are incorporated in a device which delivers proteins, carbohydrates, nucleic acid molecules, lipids and other pharmaceutically active ingredients or combinations thereof.

[0801] A transdermal patch comprising a botulinum toxin composition has been described by Donovan and is taught for example in US Patent Publication 20080220020, the contents of which are incorporated herein by reference in their entirety. According to Donovan, multiple needles are incorporated into the patch which delivers botulinum toxin under stratum corneum through said needles which project through the stratum corneum of the skin without rupturing a blood vessel.

[0802] A small, disposable drug reservoir, or patch pump, which can hold approximately 0.2 to 15 mL of liquid formulations can be placed on the skin and deliver the formulation continuously subcutaneously using a small bore needed (e.g., 26 to 34 gauge). As non-limiting examples, the patch pump may be 50 mm by 76 mm by 20 mm spring loaded having a 30 to 34 gauge needle (BD™ Microinfuser, Franklin Lakes N.J.), 41 mm by 62 mm by 17 mm with a 2 mL reservoir used for drug delivery such as insulin (OMNIPOD®, Insulet Corporation Bedford, Mass.), or 43-60 mm diameter, 10 mm thick with a 0.5 to 10 mL reservoir (PATCHPUMP®, SteadyMed Therapeutics, San Francisco, Calif.). Further, the patch pump may be battery powered and/or rechargeable.

[0803] A cryoprobe for administration of an active agent to a location of cryogenic treatment has been described by Toubia and is taught for example in US Patent Publication 20080140061, the contents of which are incorporated herein by reference in their entirety. According to Toubia, multiple needles are incorporated into the probe which receives the active agent into a chamber and administers the agent to the tissue.

[0804] A method for treating or preventing inflammation or promoting healthy joints has been described by Stock et al and is taught for example in US Patent Publication 20090155186, the contents of which are incorporated herein by reference in their entirety. According to Stock, multiple needles are incorporated in a device which administers compositions containing signal transduction modulator compounds.

[0805] A multi-site injection system has been described by Kimmell et al. and is taught for example in US Patent Publication 20100256594, the contents of which are incorporated herein by reference in their entirety. According to Kimmell, multiple needles are incorporated into a device which delivers a medication into a stratum corneum through the needles.

[0806] A method for delivering interferons to the intradermal compartment has been described by Dekker et al. and is taught for example in US Patent Publication 20050181033, the contents of which are incorporated herein by reference in their entirety. According to Dekker, multiple needles having an outlet with an exposed height between 0 and 1 mm are incorporated into a device which improves pharmacokinetics and bioavailability by delivering the substance at a depth between 0.3 mm and 2 mm.

[0807] A method for delivering genes, enzymes and biological agents to tissue cells has described by Desai and is taught for example in US Patent Publication 20030073908, the contents of which are incorporated herein by reference in their entirety. According to Desai, multiple needles are incorporated into a device which is inserted into a body and delivers a medication fluid through said needles.

[0808] A method for treating cardiac arrhythmias with fibroblast cells has been described by Lee et al and is taught for example in US Patent Publication 20040005295, the contents of which are incorporated herein by reference in their entirety. According to Lee, multiple needles are incorporated into the device which delivers fibroblast cells into the local region of the tissue.

[0809] A method using a magnetically controlled pump for treating a brain tumor has been described by Shachar et al. and is taught for example in U.S. Pat. No. 7,799,012 (method) and U.S. Pat. No. 7,799,016 (device), the contents of which are incorporated herein by reference in their entirety. According Shachar, multiple needles were incorporated into the pump which pushes a medicating agent through the needles at a controlled rate.

[0810] Methods of treating functional disorders of the bladder in mammalian females have been described by Versi et al. and are taught for example in U.S. Pat. No. 8,029,496, the contents of which are incorporated herein by reference in their entirety. According to Versi, an array of micro-needles is incorporated into a device which delivers a therapeutic agent through the needles directly into the trigone of the bladder.

[0811] A micro-needle transdermal transport device has been described by Angel et al and is taught for example in U.S. Pat. No. 7,364,568, the contents of which are incorporated herein by reference in their entirety. According to Angel, multiple needles are incorporated into the device which transports a substance into a body surface through the needles which are inserted into the surface from different directions. The micro-needle transdermal transport device may be a solid micro-needle system or a hollow micro-needle system. As a non-limiting example, the solid micro-needle system may have up to a 0.5 mg capacity, with 300-1500 solid micro-needles per cm² about 150-700 μm tall coated with a drug. The micro-needles penetrate the stratum corneum and remain in the skin for short duration (e.g., 20 seconds to 15 minutes). In another example, the hollow micro-needle system has up to a 3 mL capacity to deliver liquid formulations using 15-20 microneedles per cm2 being approximately 950 μm tall. The micro-needles penetrate the skin to allow the liquid formulations to flow from the device into the skin. The hollow micro-needle system may be worn from 1 to 30 minutes depending on the formulation volume and viscocity.

[0812] A device for subcutaneous infusion has been described by Dalton et al and is taught for example in U.S. Pat. No. 7,150,726, the contents of which are incorporated herein by reference in their entirety. According to Dalton, multiple needles are incorporated into the device which delivers fluid through the needles into a subcutaneous tissue.

[0813] A device and a method for intradermal delivery of vaccines and gene therapeutic agents through microcannula have been described by Mikszta et al. and are taught for example in U.S. Pat. No. 7,473,247, the contents of which are incorporated herein by reference in their entirety. According to Mitszta, at least one hollow micro-needle is incorporated into the device which delivers the vaccines to the subject's skin to a depth of between 0.025 mm and 2 mm.

[0814] A method of delivering insulin has been described by Pettis et al and is taught for example in U.S. Pat. No. 7,722,595, the contents of which are incorporated herein by reference in their entirety. According to Pettis, two needles are incorporated into a device wherein both needles insert essentially simultaneously into the skin with the first at a depth of less than 2.5 mm to deliver insulin to intradermal compartment and the second at a depth of greater than 2.5 mm and less than 5.0 mm to deliver insulin to subcutaneous compartment.

[0815] Cutaneous injection delivery under suction has been described by Kochamba et al. and is taught for example in U.S. Pat. No. 6,896,666, the contents of which are incorporated herein by reference in their entirety. According to Kochamba, multiple needles in relative adjacency with each other are incorporated into a device which injects a fluid below the cutaneous layer.

[0816] A device for withdrawing or delivering a substance through the skin has been described by Down et al and is taught for example in U.S. Pat. No. 6,607,513, the contents of which are incorporated herein by reference in their entirety. According to Down, multiple skin penetrating members which are incorporated into the device have lengths of about 100 microns to about 2000 microns and are about 30 to 50 gauge.

[0817] A device for delivering a substance to the skin has been described by Palmer et al and is taught for example in U.S. Pat. No. 6,537,242, the contents of which are incorporated herein by reference in their entirety. According to Palmer, an array of micro-needles is incorporated into the device which uses a stretching assembly to enhance the contact of the needles with the skin and provides a more uniform delivery of the substance.

[0818] A perfusion device for localized drug delivery has been described by Zamoyski and is taught for example in U.S. Pat. No. 6,468,247, the contents of which are incorporated herein by reference in their entirety. According to Zamoyski, multiple hypodermic needles are incorporated into the device which injects the contents of the hypodermics into a tissue as said hypodermics are being retracted.

[0819] A method for enhanced transport of drugs and biological molecules across tissue by improving the interaction between micro-needles and human skin has been described by Prausnitz et al. and is taught for example in U.S. Pat. No. 6,743,211, the contents of which are incorporated herein by reference in their entirety. According to Prausnitz, multiple micro-needles are incorporated into a device which is able to present a more rigid and less deformable surface to which the micro-needles are applied.

[0820] A device for intraorgan administration of medicinal agents has been described by Ting et al and is taught for example in U.S. Pat. No. 6,077,251, the contents of which are incorporated herein by reference in their entirety. According to Ting, multiple needles having side openings for enhanced administration are incorporated into a device which by extending and retracting said needles from and into the needle chamber forces a medicinal agent from a reservoir into said needles and injects said medicinal agent into a target organ.

[0821] A multiple needle holder and a subcutaneous multiple channel infusion port has been described by Brown and is taught for example in U.S. Pat. No. 4,695,273, the contents of which are incorporated herein by reference in their entirety. According to Brown, multiple needles on the needle holder are inserted through the septum of the infusion port and communicate with isolated chambers in said infusion port.

[0822] A dual hypodermic syringe has been described by Horn and is taught for example in U.S. Pat. No. 3,552,394, the contents of which are incorporated herein by reference in their entirety. According to Horn, two needles incorporated into the device are spaced apart less than 68 mm and may be of different styles and lengths, thus enabling injections to be made to different depths.

[0823] A syringe with multiple needles and multiple fluid compartments has been described by Hershberg and is taught for example in U.S. Pat. No. 3,572,336, the contents of which are incorporated herein by reference in their entirety. According to Hershberg, multiple needles are incorporated into the syringe which has multiple fluid compartments and is capable of simultaneously administering incompatible drugs which are not able to be mixed for one injection.

[0824] A surgical instrument for intradermal injection of fluids has been described by Eliscu et al. and is taught for example in U.S. Pat. No. 2,588,623, the contents of which are incorporated herein by reference in their entirety. According to Eliscu, multiple needles are incorporated into the instrument which injects fluids intradermally with a wider disperse.

[0825] An apparatus for simultaneous delivery of a substance to multiple breast milk ducts has been described by Hung and is taught for example in EP 1818017, the contents of which are incorporated herein by reference in their entirety. According to Hung, multiple lumens are incorporated into the device which inserts though the orifices of the ductal networks and delivers a fluid to the ductal networks.

[0826] A catheter for introduction of medications to the tissue of a heart or other organs has been described by Tkebuchava and is taught for example in WO2006138109, the contents of which are incorporated herein by reference in their entirety. According to Tkebuchava, two curved needles are incorporated which enter the organ wall in a flattened trajectory.

[0827] Devices for delivering medical agents have been described by Mckay et al. and are taught for example in WO2006118804, the content of which are incorporated herein by reference in their entirety. According to Mckay, multiple needles with multiple orifices on each needle are incorporated into the devices to facilitate regional delivery to a tissue, such as the interior disc space of a spinal disc.

[0828] A method for directly delivering an immunomodulatory substance into an intradermal space within a mammalian skin has been described by Pettis and is taught for example in WO2004020014, the contents of which are incorporated herein by reference in their entirety. According to Pettis, multiple needles are incorporated into a device which delivers the substance through the needles to a depth between 0.3 mm and 2 mm.

[0829] Methods and devices for administration of substances into at least two compartments in skin for systemic absorption and improved pharmacokinetics have been described by Pettis et al. and are taught for example in WO2003094995, the contents of which are incorporated herein by reference in their entirety. According to Pettis, multiple needles having lengths between about 300 μm and about 5 mm are incorporated into a device which delivers to intradermal and subcutaneous tissue compartments simultaneously.

[0830] A drug delivery device with needles and a roller has been described by Zimmerman et al. and is taught for example in WO2012006259, the contents of which are incorporated herein by reference in their entirety. According to Zimmerman, multiple hollow needles positioned in a roller are incorporated into the device which delivers the content in a reservoir through the needles as the roller rotates.

Methods and Devices Utilizing Catheters and/or Lumens

[0831] Methods and devices using catheters and lumens may be employed to administer the cell phenotype altering mmRNA of the present invention on a single, multi- or split dosing schedule. Such methods and devices are described below.

[0832] A catheter-based delivery of skeletal myoblasts to the myocardium of damaged hearts has been described by Jacoby et al and is taught for example in US Patent Publication 20060263338, the contents of which are incorporated herein by reference in their entirety. According to Jacoby, multiple needles are incorporated into the device at least part of which is inserted into a blood vessel and delivers the cell composition through the needles into the localized region of the subject's heart.

[0833] An apparatus for treating asthma using neurotoxin has been described by Deem et al and is taught for example in US Patent Publication 20060225742, the contents of which are incorporated herein by reference in their entirety. According to Deem, multiple needles are incorporated into the device which delivers neurotoxin through the needles into the bronchial tissue.

[0834] A method for administering multiple-component therapies has been described by Nayak and is taught for example in U.S. Pat. No. 7,699,803, the contents of which are incorporated herein by reference in their entirety. According to Nayak, multiple injection cannulas may be incorporated into a device wherein depth slots may be included for controlling the depth at which the therapeutic substance is delivered within the tissue.

[0835] A surgical device for ablating a channel and delivering at least one therapeutic agent into a desired region of the tissue has been described by McIntyre et al and is taught for example in U.S. Pat. No. 8,012,096, the contents of which are incorporated herein by reference in their entirety. According to McIntyre, multiple needles are incorporated into the device which dispenses a therapeutic agent into a region of tissue surrounding the channel and is particularly well suited for transmyocardial revascularization operations.

[0836] Methods of treating functional disorders of the bladder in mammalian females have been described by Versi et al and are taught for example in U.S. Pat. No. 8,029,496, the contents of which are incorporated herein by reference in their entirety. According to Versi, an array of micro-needles is incorporated into a device which delivers a therapeutic agent through the needles directly into the trigone of the bladder.

[0837] A device and a method for delivering fluid into a flexible biological barrier have been described by Yeshurun et al. and are taught for example in U.S. Pat. No. 7,998,119 (device) and U.S. Pat. No. 8,007,466 (method), the contents of which are incorporated herein by reference in their entirety. According to Yeshurun, the micro-needles on the device penetrate and extend into the flexible biological barrier and fluid is injected through the bore of the hollow micro-needles.

[0838] A method for epicardially injecting a substance into an area of tissue of a heart having an epicardial surface and disposed within a torso has been described by Bonner et al and is taught for example in U.S. Pat. No. 7,628,780, the contents of which are incorporated herein by reference in their entirety. According to Bonner, the devices have elongate shafts and distal injection heads for driving needles into tissue and injecting medical agents into the tissue through the needles.

[0839] A device for sealing a puncture has been described by Nielsen et al and is taught for example in U.S. Pat. No. 7,972,358, the contents of which are incorporated herein by reference in their entirety. According to Nielsen, multiple needles are incorporated into the device which delivers a closure agent into the tissue surrounding the puncture tract.

[0840] A method for myogenesis and angiogenesis has been described by Chiu et al. and is taught for example in U.S. Pat. No. 6,551,338, the contents of which are incorporated herein by reference in their entirety. According to Chiu, 5 to 15 needles having a maximum diameter of at least 1.25 mm and a length effective to provide a puncture depth of 6 to 20 mm are incorporated into a device which inserts into proximity with a myocardium and supplies an exogeneous angiogenic or myogenic factor to said myocardium through the conduits which are in at least some of said needles.

[0841] A method for the treatment of prostate tissue has been described by Bolmsj et al. and is taught for example in U.S. Pat. No. 6,524,270, the contents of which are incorporated herein by reference in their entirety. According to Bolmsj, a device comprising a catheter which is inserted through the urethra has at least one hollow tip extendible into the surrounding prostate tissue. An astringent and analgesic medicine is administered through said tip into said prostate tissue.

[0842] A method for infusing fluids to an intraosseous site has been described by Findlay et al. and is taught for example in U.S. Pat. No. 6,761,726, the contents of which are incorporated herein by reference in their entirety. According to Findlay, multiple needles are incorporated into a device which is capable of penetrating a hard shell of material covered by a layer of soft material and delivers a fluid at a predetermined distance below said hard shell of material.

[0843] A device for injecting medications into a vessel wall has been described by Vigil et al. and is taught for example in U.S. Pat. No. 5,713,863, the contents of which are incorporated herein by reference in their entirety. According to Vigil, multiple injectors are mounted on each of the flexible tubes in the device which introduces a medication fluid through a multi-lumen catheter, into said flexible tubes and out of said injectors for infusion into the vessel wall.

[0844] A catheter for delivering therapeutic and/or diagnostic agents to the tissue surrounding a bodily passageway has been described by Faxon et al. and is taught for example in U.S. Pat. No. 5,464,395, the contents of which are incorporated herein by reference in their entirety. According to Faxon, at least one needle cannula is incorporated into the catheter which delivers the desired agents to the tissue through said needles which project outboard of the catheter.

[0845] Balloon catheters for delivering therapeutic agents have been described by Orr and are taught for example in WO2010024871, the contents of which are incorporated herein by reference in their entirety. According to Orr, multiple needles are incorporated into the devices which deliver the therapeutic agents to different depths within the tissue.

### Methods and Devices Utilizing Electrical Current

[0846] Methods and devices utilizing electric current may be employed to deliver the cell phenotype altering mmRNA of the present invention according to the single, multi- or split dosing regimens taught herein. Such methods and devices are described below.

[0847] An electro collagen induction therapy device has been described by Marquez and is taught for example in US Patent Publication 20090137945, the contents of which are incorporated herein by reference in their entirety. According to Marquez, multiple needles are incorporated into the device which repeatedly pierce the skin and draw in the skin a portion of the substance which is applied to the skin first.

[0848] An electrokinetic system has been described by Etheredge et al. and is taught for example in US Patent Publication 20070185432, the contents of which are incorporated herein by reference in their entirety. According to Etheredge, micro-needles are incorporated into a device which drives by an electrical current the medication through the needles into the targeted treatment site.

[0849] An iontophoresis device has been described by Matsumura et al. and is taught for example in U.S. Pat. No. 7,437,189, the contents of which are incorporated herein by reference in their entirety. According to Matsumura, multiple needles are incorporated into the device which is capable of delivering ionizable drug into a living body at higher speed or with higher efficiency.

[0850] Intradermal delivery of biologically active agents by needle-free injection and electroporation has been described by Hoffmann et al and is taught for example in U.S. Pat. No. 7,171,264, the contents of which are incorporated herein by reference in their entirety. According to Hoffmann, one or more needle-free injectors are incorporated into an electroporation device and the combination of needle-free injection and electroporation is sufficient to introduce the agent into cells in skin, muscle or mucosa.

[0851] A method for electropermeabilization-mediated intracellular delivery has been described by Lundkvist et al. and is taught for example in U.S. Pat. No. 6,625,486, the contents of which are incorporated herein by reference in their entirety. According to Lundkvist, a pair of needle electrodes is incorporated into a catheter. Said catheter is positioned into a body lumen followed by extending said needle electrodes to penetrate into the tissue surrounding said lumen. Then the device introduces an agent through at least one of said needle electrodes and applies electric field by said pair of needle electrodes to allow said agent pass through the cell membranes into the cells at the treatment site.

[0852] A delivery system for transdermal immunization has been described by Levin et al. and is taught for example in WO2006003659, the contents of which are incorporated herein by reference in their entirety. According to Levin, multiple electrodes are incorporated into the device which applies electrical energy between the electrodes to generate micro channels in the skin to facilitate transdermal delivery.

[0853] A method for delivering RF energy into skin has been described by Schomacker and is taught for example in WO2011163264, the contents of which are incorporated herein by reference in their entirety. According to Schomacker, multiple needles are incorporated into a device which applies vacuum to draw skin into contact with a plate so that needles insert into skin through the holes on the plate and deliver RF energy.

### VII. DEFINITIONS

[0854] At various places in the present specification, substituents of compounds of the present disclosure are disclosed in groups or in ranges. It is specifically intended that the present disclosure include each and every individual subcombination of the members of such groups and ranges. For example, the term “C₁₋₆ alkyl” is specifically intended to individually disclose methyl, ethyl, C₃ alkyl, C₄ alkyl, C₅ alkyl, and C₆ alkyl.

[0855] About: As used herein, the term “about” means +/−10% of the recited value.

[0856] Administered in combination: As used herein, the term “administered in combination” or “combined administration” means that two or more agents are administered to a subject at the same time or within an interval such that there may be an overlap of an effect of each agent on the patient. In some embodiments, they are administered within about 60, 30, 15, 10, 5, or 1 minute of one another. In some embodiments, the administrations of the agents are spaced sufficiently closely together such that a combinatorial (e.g., a synergistic) effect is achieved.

[0857] Animal: As used herein, the term “animal” refers to any member of the animal kingdom. In some embodiments, “animal” refers to humans at any stage of development. In some embodiments, “animal” refers to non-human animals at any stage of development. In certain embodiments, the non-human animal is a mammal (e.g., a rodent, a mouse, a rat, a rabbit, a monkey, a dog, a cat, a sheep, cattle, a primate, or a pig). In some embodiments, animals include, but are not limited to, mammals, birds, reptiles, amphibians, fish, and worms. In some embodiments, the animal is a transgenic animal, genetically-engineered animal, or a clone.

[0858] Antigens of interest or desired antigens: As used herein, the terms “antigens of interest” or “desired antigens” include those proteins and other biomolecules provided herein that are immunospecifically bound by the antibodies and fragments, mutants, variants, and alterations thereof described herein. Examples of antigens of interest include, but are not limited to, insulin, insulin-like growth factor, hGH, tPA, cytokines, such as interleukins (IL), e.g., IL-1, IL-2, IL-3, IL-4, IL-5, IL-6, IL-7, IL-8, IL-9, IL-10, IL-11, IL-12, IL-13, IL-14, IL-15, IL-16, IL-17, IL-18, interferon (IFN) alpha, IFN beta, IFN gamma, IFN omega or IFN tau, tumor necrosis factor (TNF), such as TNF alpha and TNF beta, TNF gamma, TRAIL; G-CSF, GM-CSF, M-CSF, MCP-1 and VEGF.

[0859] Approximately: As used herein, the term “approximately” or “about,” as applied to one or more values of interest, refers to a value that is similar to a stated reference value. In certain embodiments, the term “approximately” or “about” refers to a range of values that fall within 25%, 20%, 19%, 18%, 17%, 16%, 15%, 14%, 13%, 12%, 11%, 10%, 9%, 8%, 7%, 6%, 5%, 4%, 3%, 2%, 1%, or less in either direction (greater than or less than) of the stated reference value unless otherwise stated or otherwise evident from the context (except where such number would exceed 100% of a possible value). ASCLJ: As used herein, the term “ASCL1” refers to the achaete-scute complex homolog 1 protein including any variants thereof.

[0860] Associated with: As used herein, the terms “associated with,” “conjugated,” “linked,” “attached,” and “tethered,” when used with respect to two or more moieties, means that the moieties are physically associated or connected with one another, either directly or via one or more additional moieties that serves as a linking agent, to form a structure that is sufficiently stable so that the moieties remain physically associated under the conditions in which the structure is used, e.g., physiological conditions. An “association” need not be strictly through direct covalent chemical bonding. It may also suggest ionic or hydrogen bonding or a hybridization based connectivity sufficiently stable such that the “associated” entities remain physically associated. BDNF: As used herein, the term “BDNF” refers to brain-derived neurotrophic factor protein including any variants thereof.

[0861] Bifunctional: As used herein, the term “bifunctional” refers to any substance, molecule or moiety which is capable of or maintains at least two functions. The functions may effect the same outcome or a different outcome. The structure that produces the function may be the same or different. For example, bifunctional modified RNAs of the present invention may encode a cytotoxic peptide (a first function) while those nucleosides which comprise the encoding RNA are, in and of themselves, cytotoxic (second function). In this example, delivery of the bifunctional modified RNA to a cancer cell would produce not only a peptide or protein molecule which may ameliorate or treat the cancer but would also deliver a cytotoxic payload of nucleosides to the cell should degradation, instead of translation of the modified RNA, occur.

[0862] Biocompatible: As used herein, the term “biocompatible” means compatible with living cells, tissues, organs or systems posing little to no risk of injury, toxicity or rejection by the immune system.

[0863] Biodegradable: As used herein, the term “biodegradable” means capable of being broken down into innocuous products by the action of living things.

[0864] Biologically active: As used herein, the phrase “biologically active” refers to a characteristic of any substance that has activity in a biological system and/or organism. For instance, a substance that, when administered to an organism, has a biological effect on that organism, is considered to be biologically active. In particular embodiments, a cell phenotype altering polynucleotide, primary construct or mmRNA of the present invention may be considered biologically active if even a portion of the cell phenotype altering polynucleotide, primary construct or mmRNA is biologically active or mimics an activity considered biologically relevant. BRN2: As used herein, the term “BRN2” refers to the POU class 3 homeobox 2 protein including any variants thereof. BRN2 is also known in the art as OTF7 and POU domain class 3, transcription factor 2 (POU3F2).

[0865] Cancer stem cells: As used herein, “cancer stem cells” are cells that can undergo self-renewal and/or abnormal proliferation and differentiation to form a tumor.

[0866] CEBP-alpha: As used herein, the term “CEBP-alpha” refers to CCAAT/enhancer binding protein (C/EBP), alpha protein including any variants thereof

[0867] Chemical terms: The following provides the definition of various chemical terms from “acyl” to “thiol.”

[0868] The term “acyl,” as used herein, represents a hydrogen or an alkyl group (e.g., a haloalkyl group), as defined herein, that is attached to the parent molecular group through a carbonyl group, as defined herein, and is exemplified by formyl (i.e., a carboxyaldehyde group), acetyl, propionyl, butanoyl and the like. Exemplary unsubstituted acyl groups include from 1 to 7, from 1 to 11, or from 1 to 21 carbons. In some embodiments, the alkyl group is further substituted with 1, 2, 3, or 4 substituents as described herein.

[0869] The term “acylamino,” as used herein, represents an acyl group, as defined herein, attached to the parent molecular group though an amino group, as defined herein (i.e., —N(R^{N1})—C(O)—R, where R is H or an optionally substituted C₁₋₆, C₁₋₁₀, or C₁₋₂₀ alkyl group and R^{N1} is as defined herein). Exemplary unsubstituted acylamino groups include from 1 to 41 carbons (e.g., from 1 to 7, from 1 to 13, from 1 to 21, from 2 to 7, from 2 to 13, from 2 to 21, or from 2 to 41 carbons). In some embodiments, the alkyl group is further substituted with 1, 2, 3, or 4 substituents as described herein, and/or the amino group is —NH₂ or —NHR^{N1}, wherein R^{N1} is, independently, OH, NO₂, NH₂, NR^{N2}₂, SO₂OR^{N2}, SO₂R^{N2}, SOR^{N2}, alkyl, or aryl, and each R^{N2} can be H, alkyl, or aryl.

[0870] The term “acyloxy,” as used herein, represents an acyl group, as defined herein, attached to the parent molecular group though an oxygen atom (i.e., —O—C(O)—R, where R is H or an optionally substituted C₁₋₆, C₁₋₁₀, or C₁₋₂₀ alkyl group). Exemplary unsubstituted acyloxy groups include from 1 to 21 carbons (e.g., from 1 to 7 or from 1 to 11 carbons). In some embodiments, the alkyl group is further substituted with 1, 2, 3, or 4 substituents as described herein, and/or the amino group is —NH₂ or —NHR^{N1}, wherein R^{N1} is, independently, OH, NO₂, NH₂, NR^{N2}₂, SO₂OR^{N2}, SO₂R^{N2}, SOR^{N2}, alkyl, or aryl, and each R^{N2} can be H, alkyl, or aryl.

[0871] The term “alkaryl,” as used herein, represents an aryl group, as defined herein, attached to the parent molecular group through an alkylene group, as defined herein. Exemplary unsubstituted alkaryl groups are from 7 to 30 carbons (e.g., from 7 to 16 or from 7 to 20 carbons, such as C₁₋₆ alk-C₆₋₁₀ aryl, C₁₋₁₀ alk-C₆₋₁₀ aryl, or C₁₋₂₀ alk-C₆₋₁₀ aryl). In some embodiments, the alkylene and the aryl each can be further substituted with 1, 2, 3, or 4 substituent groups as defined herein for the respective groups. Other groups preceded by the prefix “alk-” are defined in the same manner, where “alk” refers to a C₁₋₆ alkylene, unless otherwise noted, and the attached chemical structure is as defined herein.

[0872] The term “alkcycloalkyl” represents a cycloalkyl group, as defined herein, attached to the parent molecular group through an alkylene group, as defined herein (e.g., an alkylene group of from 1 to 4, from 1 to 6, from 1 to 10, or form 1 to 20 carbons). In some embodiments, the alkylene and the cycloalkyl each can be further substituted with 1, 2, 3, or 4 substituent groups as defined herein for the respective group.

[0873] The term “alkenyl,” as used herein, represents monovalent straight or branched chain groups of, unless otherwise specified, from 2 to 20 carbons (e.g., from 2 to 6 or from 2 to 10 carbons) containing one or more carbon-carbon double bonds and is exemplified by ethenyl, 1-propenyl, 2-propenyl, 2-methyl-1-propenyl, 1-butenyl, 2-butenyl, and the like. Alkenyls include both cis and trans isomers. Alkenyl groups may be optionally substituted with 1, 2, 3, or 4 substituent groups that are selected, independently, from amino, aryl, cycloalkyl, or heterocyclyl (e.g., heteroaryl), as defined herein, or any of the exemplary alkyl substituent groups described herein.

[0874] The term “alkenyloxy” represents a chemical substituent of formula —OR, where R is a C₂₋₂₀ alkenyl group (e.g., C₂₋₆ or C₂₋₁₀ alkenyl), unless otherwise specified. Exemplary alkenyloxy groups include ethenyloxy, propenyloxy, and the like. In some embodiments, the alkenyl group can be further substituted with 1, 2, 3, or 4 substituent groups as defined herein (e.g., a hydroxy group).

[0875] The term “alkheteroaryl” refers to a heteroaryl group, as defined herein, attached to the parent molecular group through an alkylene group, as defined herein. Exemplary unsubstituted alkheteroaryl groups are from 2 to 32 carbons (e.g., from 2 to 22, from 2 to 18, from 2 to 17, from 2 to 16, from 3 to 15, from 2 to 14, from 2 to 13, or from 2 to 12 carbons, such as C₁₋₆ alk-C₁₋₁₂ heteroaryl, C₁₋₁₀ alk-C₁₋₁₂ heteroaryl, or C₁₋₂₀ alk-C₁₋₁₂ heteroaryl). In some embodiments, the alkylene and the heteroaryl each can be further substituted with 1, 2, 3, or 4 substituent groups as defined herein for the respective group. Alkheteroaryl groups are a subset of alkheterocyclyl groups.

[0876] The term “alkheterocyclyl” represents a heterocyclyl group, as defined herein, attached to the parent molecular group through an alkylene group, as defined herein. Exemplary unsubstituted alkheterocyclyl groups are from 2 to 32 carbons (e.g., from 2 to 22, from 2 to 18, from 2 to 17, from 2 to 16, from 3 to 15, from 2 to 14, from 2 to 13, or from 2 to 12 carbons, such as C₁₋₆ alk-C₁₋₁₂ heterocyclyl, C₁₋₁₀ alk-C₁₋₁₂ heterocyclyl, or C₁₋₂₀ alk-C₁₋₁₂ heterocyclyl). In some embodiments, the alkylene and the heterocyclyl each can be further substituted with 1, 2, 3, or 4 substituent groups as defined herein for the respective group.

[0877] The term “alkoxy” represents a chemical substituent of formula —OR, where R is a C₁₋₂₀ alkyl group (e.g., C₁₋₆ or C₁₋₁₀ alkyl), unless otherwise specified. Exemplary alkoxy groups include methoxy, ethoxy, propoxy (e.g., n-propoxy and isopropoxy), t-butoxy, and the like. In some embodiments, the alkyl group can be further substituted with 1, 2, 3, or 4 substituent groups as defined herein (e.g., hydroxy or alkoxy).

[0878] The term “alkoxyalkoxy” represents an alkoxy group that is substituted with an alkoxy group. Exemplary unsubstituted alkoxyalkoxy groups include between 2 to 40 carbons (e.g., from 2 to 12 or from 2 to 20 carbons, such as C₁₋₆ alkoxy-C₁₋₆ alkoxy, C₁₋₁₀ alkoxy-C₁₋₁₀ alkoxy, or C₁₋₂₀ alkoxy-C₁₋₂₀ alkoxy). In some embodiments, the each alkoxy group can be further substituted with 1, 2, 3, or 4 substituent groups as defined herein.

[0879] The term “alkoxyalkyl” represents an alkyl group that is substituted with an alkoxy group. Exemplary unsubstituted alkoxyalkyl groups include between 2 to 40 carbons (e.g., from 2 to 12 or from 2 to 20 carbons, such as C₁₋₆ alkoxy-C₁₋₆ alkyl, C₁₋₁₀ alkoxy-C₁₋₁₀ alkyl, or C₁₋₂₀ alkoxy-C₁₋₂₀ alkyl). In some embodiments, the alkyl and the alkoxy each can be further substituted with 1, 2, 3, or 4 substituent groups as defined herein for the respective group.

[0880] The term “alkoxycarbonyl,” as used herein, represents an alkoxy, as defined herein, attached to the parent molecular group through a carbonyl atom (e.g., —C(O)—OR, where R is H or an optionally substituted C₁₋₆, C₁₋₁₀, or C₁₋₂₀ alkyl group). Exemplary unsubstituted alkoxycarbonyl include from 1 to 21 carbons (e.g., from 1 to 11 or from 1 to 7 carbons). In some embodiments, the alkoxy group is further substituted with 1, 2, 3, or 4 substituents as described herein.

[0881] The term “alkoxycarbonylalkoxy,” as used herein, represents an alkoxy group, as defined herein, that is substituted with an alkoxycarbonyl group, as defined herein (e.g., —O-alkyl-C(O)—OR, where R is an optionally substituted C₁₋₆, C₁₋₁₀, or C₁₋₂₀ alkyl group). Exemplary unsubstituted alkoxycarbonylalkoxy include from 3 to 41 carbons (e.g., from 3 to 10, from 3 to 13, from 3 to 17, from 3 to 21, or from 3 to 31 carbons, such as C₁₋₆ alkoxycarbonyl-C₁₋₆ alkoxy, C₁₋₁₀ alkoxycarbonyl-C₁₋₁₀ alkoxy, or C₁₋₂₀ alkoxycarbonyl-C₁₋₂₀ alkoxy). In some embodiments, each alkoxy group is further independently substituted with 1, 2, 3, or 4 substituents, as described herein (e.g., a hydroxy group).

[0882] The term “alkoxycarbonylalkyl,” as used herein, represents an alkyl group, as defined herein, that is substituted with an alkoxycarbonyl group, as defined herein (e.g., -alkyl-C(O)—OR, where R is an optionally substituted C₁₋₂₀, C₁₋₁₀, or C₁₋₆ alkyl group). Exemplary unsubstituted alkoxycarbonylalkyl include from 3 to 41 carbons (e.g., from 3 to 10, from 3 to 13, from 3 to 17, from 3 to 21, or from 3 to 31 carbons, such as C₁₋₆ alkoxycarbonyl-C₁₋₆ alkyl, C₁₋₁₀ alkoxycarbonyl-C₁₋₁₀ alkyl, or C₁₋₂₀ alkoxycarbonyl-C₁₋₂₀ alkyl). In some embodiments, each alkyl and alkoxy group is further independently substituted with 1, 2, 3, or 4 substituents as described herein (e.g., a hydroxy group).

[0883] The term “alkyl,” as used herein, is inclusive of both straight chain and branched chain saturated groups from 1 to 20 carbons (e.g., from 1 to 10 or from 1 to 6), unless otherwise specified. Alkyl groups are exemplified by methyl, ethyl, n- and isopropyl, n-, sec-, iso- and tert-butyl, neopentyl, and the like, and may be optionally substituted with one, two, three, or, in the case of alkyl groups of two carbons or more, four substituents independently selected from the group consisting of: (1) C₁₋₆ alkoxy; (2) C₁₋₆ alkylsulfinyl; (3) amino, as defined herein (e.g., unsubstituted amino (i.e., —NH₂) or a substituted amino (i.e., —N(R^{N1})₂, where R^{N1} is as defined for amino); (4) C₆₋₁₀ aryl-C₁₋₆ alkoxy; (5) azido; (6) halo; (7) (C₂₋₉ heterocyclyl)oxy; (8) hydroxy; (9) nitro; (10) oxo (e.g., carboxyaldehyde or acyl); (11) C₁₋₇ spirocyclyl; (12) thioalkoxy; (13) thiol; (14) —CO₂R^{A′}, where R^{A′} is selected from the group consisting of (a) C₁₋₂₀ alkyl (e.g., C₁₋₆ alkyl), (b) C₂₋₂₀ alkenyl (e.g., C₂₋₆ alkenyl), (c) C₆₋₁₀ aryl, (d) hydrogen, (e) C₁₋₆ alk-C₆₋₁₀ aryl, (f) amino-C₁₋₂₀ alkyl, (g) polyethylene glycol of —(CH₂)ₛ₂(OCH₂CH₂)ₛ₁(CH₂)ₛ₃OR′, wherein s1 is an integer from 1 to 10 (e.g., from 1 to 6 or from 1 to 4), each of s2 and s3, independently, is an integer from 0 to 10 (e.g., from 0 to 4, from 0 to 6, from 1 to 4, from 1 to 6, or from 1 to 10), and R′ is H or C₁₋₂₀ alkyl, and (h) amino-polyethylene glycol of —NR^{N1}(CH₂)ₛ₂(CH₂CH₂O)ₛ₁(CH₂)ₛ₃NR^{N1}, wherein s1 is an integer from 1 to 10 (e.g., from 1 to 6 or from 1 to 4), each of s2 and s3, independently, is an integer from 0 to 10 (e.g., from 0 to 4, from 0 to 6, from 1 to 4, from 1 to 6, or from 1 to 10), and each R^{N1} is, independently, hydrogen or optionally substituted C₁₋₆ alkyl; (15) —C(O)NR^{B′}R^{C′}, where each of R^{B′} and R^{C′} is, independently, selected from the group consisting of (a) hydrogen, (b) C₁₋₆ alkyl, (c) C₆₋₁₀ aryl, and (d) C₁₋₆ alk-C₆₋₁₀ aryl; (16) —SO₂R^{D′}, where R^{D′} is selected from the group consisting of (a) C₁₋₆ alkyl, (b) C₆₋₁₀ aryl, (c) C₁₋₆ alk-C₆₋₁₀ aryl, and (d) hydroxy; (17) —SO₂NR^{E′}R^{F′}, where each of R^{E′} and R^{F′} is, independently, selected from the group consisting of (a) hydrogen, (b) C₁₋₆ alkyl, (c) C₆₋₁₀ aryl and (d) C₁₋₆ alk-C₆₋₁₀ aryl; (18) —C(O)R^{G′}, where R^{G′} is selected from the group consisting of (a) C₁₋₂₀ alkyl (e.g., C₁₋₆ alkyl), (b) C₂₋₂₀ alkenyl (e.g., C₂₋₆ alkenyl), (c) C₆₋₁₀ aryl, (d) hydrogen, (e) C₁₋₆ alk-C₆₋₁₀ aryl, (f) amino-C₁₋₂₀ alkyl, (g) polyethylene glycol of —(CH₂)ₛ₂(OCH₂CH₂)ₛ₁(CH₂)ₛ₃OR′, wherein s1 is an integer from 1 to 10 (e.g., from 1 to 6 or from 1 to 4), each of s2 and s3, independently, is an integer from 0 to 10 (e.g., from 0 to 4, from 0 to 6, from 1 to 4, from 1 to 6, or from 1 to 10), and R′ is H or C₁₋₂₀ alkyl, and (h) amino-polyethylene glycol of —NR^{N1}(CH₂)ₛ₂(CH₂CH₂O)ₛ₁(CH₂)ₛ₃NR^{N1}, wherein s1 is an integer from 1 to 10 (e.g., from 1 to 6 or from 1 to 4), each of s2 and s3, independently, is an integer from 0 to 10 (e.g., from 0 to 4, from 0 to 6, from 1 to 4, from 1 to 6, or from 1 to 10), and each R^{N1} is, independently, hydrogen or optionally substituted C₁₋₆ alkyl; (19) —NR^{H′}C(O)R^{I′}, wherein R^{H′} is selected from the group consisting of (a1) hydrogen and (b1) C₁₋₆ alkyl, and R^{I′} is selected from the group consisting of (a2) C₁₋₂₀ alkyl (e.g., C₁₋₆ alkyl), (b2) C₂₋₂₀ alkenyl (e.g., C₂₋₆ alkenyl), (c2) C₆₋₁₀ aryl, (d2) hydrogen, (e2) C₁₋₆ alk-C₆₋₁₀ aryl, (f2) amino-C₁₋₂₀ alkyl, (g2) polyethylene glycol of —(CH₂)ₛ₂(OCH₂CH₂)ₛ₁(CH₂)ₛ₃OR′, wherein s1 is an integer from 1 to 10 (e.g., from 1 to 6 or from 1 to 4), each of s2 and s3, independently, is an integer from 0 to 10 (e.g., from 0 to 4, from 0 to 6, from 1 to 4, from 1 to 6, or from 1 to 10), and R′ is H or C₁₋₂₀ alkyl, and (h2) amino-polyethylene glycol of —NR^{N1}(CH₂)ₛ₂(CH₂CH₂O)ₛ₁(CH₂)ₛ₃NR^{N1}, wherein s1 is an integer from 1 to 10 (e.g., from 1 to 6 or from 1 to 4), each of s2 and s3, independently, is an integer from 0 to 10 (e.g., from 0 to 4, from 0 to 6, from 1 to 4, from 1 to 6, or from 1 to 10), and each R^{N1} is, independently, hydrogen or optionally substituted C₁₋₆ alkyl; (20) —NR^{J′}C(O)OR^{K′}, wherein R^{J′} is selected from the group consisting of (a1) hydrogen and (b1) C₁₋₆ alkyl, and R^{K′} is selected from the group consisting of (a2) C₁₋₂₀ alkyl (e.g., C₁₋₆ alkyl), (b2) C2-20 alkenyl (e.g., C₂₋₆ alkenyl), (c2) C₆₋₁₀ aryl, (d2) hydrogen, (e2) C₁₋₆ alk-C₆₋₁₀ aryl, (f2) amino-C₁₋₂₀ alkyl, (g2) polyethylene glycol of —(CH₂)ₛ₂(OCH₂CH₂)ₛ₁(CH₂)ₛ₃OR′, wherein s1 is an integer from 1 to 10 (e.g., from 1 to 6 or from 1 to 4), each of s2 and s3, independently, is an integer from 0 to 10 (e.g., from 0 to 4, from 0 to 6, from 1 to 4, from 1 to 6, or from 1 to 10), and R′ is H or C₁₋₂₀ alkyl, and (h2) amino-polyethylene glycol of —NR^{N1}(CH₂)ₛ₂(CH₂CH₂O)ₛ₁(CH₂)ₛ₃NR^{N1}, wherein s1 is an integer from 1 to 10 (e.g., from 1 to 6 or from 1 to 4), each of s2 and s3, independently, is an integer from 0 to 10 (e.g., from 0 to 4, from 0 to 6, from 1 to 4, from 1 to 6, or from 1 to 10), and each R^{N1} is, independently, hydrogen or optionally substituted C₁₋₆ alkyl; and (21) amidine. In some embodiments, each of these groups can be further substituted as described herein. For example, the alkylene group of a C₁-alkaryl can be further substituted with an oxo group to afford the respective aryloyl substituent.

[0884] The term “alkylene” and the prefix “alk-,” as used herein, represent a saturated divalent hydrocarbon group derived from a straight or branched chain saturated hydrocarbon by the removal of two hydrogen atoms, and is exemplified by methylene, ethylene, isopropylene, and the like. The term “C_{x-y} alkylene” and the prefix “C_{x-y} alk-” represent alkylene groups having between x and y carbons. Exemplary values for x are 1, 2, 3, 4, 5, and 6, and exemplary values for y are 2, 3, 4, 5, 6, 7, 8, 9, 10, 12, 14, 16, 18, or 20 (e.g., C₁₋₆, C₁₋₁₀, C₂₋₂₀, C₂₋₆, C₂₋₁₀, or C₂₋₂₀ alkylene). In some embodiments, the alkylene can be further substituted with 1, 2, 3, or 4 substituent groups as defined herein for an alkyl group.

[0885] The term “alkylsulfinyl,” as used herein, represents an alkyl group attached to the parent molecular group through an —S(O)— group. Exemplary unsubstituted alkylsulfinyl groups are from 1 to 6, from 1 to 10, or from 1 to 20 carbons. In some embodiments, the alkyl group can be further substituted with 1, 2, 3, or 4 substituent groups as defined herein.

[0886] The term “alkylsulfinylalkyl,” as used herein, represents an alkyl group, as defined herein, substituted by an alkylsulfinyl group. Exemplary unsubstituted alkylsulfinylalkyl groups are from 2 to 12, from 2 to 20, or from 2 to 40 carbons. In some embodiments, each alkyl group can be further substituted with 1, 2, 3, or 4 substituent groups as defined herein.

[0887] The term “alkynyl,” as used herein, represents monovalent straight or branched chain groups from 2 to 20 carbon atoms (e.g., from 2 to 4, from 2 to 6, or from 2 to 10 carbons) containing a carbon-carbon triple bond and is exemplified by ethynyl, 1-propynyl, and the like. Alkynyl groups may be optionally substituted with 1, 2, 3, or 4 substituent groups that are selected, independently, from aryl, cycloalkyl, or heterocyclyl (e.g., heteroaryl), as defined herein, or any of the exemplary alkyl substituent groups described herein.

[0888] The term “alkynyloxy” represents a chemical substituent of formula —OR, where R is a C₂₋₂₀ alkynyl group (e.g., C₂₋₆ or C₂₋₁₀ alkynyl), unless otherwise specified. Exemplary alkynyloxy groups include ethynyloxy, propynyloxy, and the like. In some embodiments, the alkynyl group can be further substituted with 1, 2, 3, or 4 substituent groups as defined herein (e.g., a hydroxy group).

[0889] The term “amidine,” as used herein, represents a —C(═NH)NH₂ group.

[0890] The term “amino,” as used herein, represents —N(R^{N1})₂, wherein each R^{N1} is, independently, H, OH, NO₂, N(R^{N2})², SO₂OR^{N2}, SO₂R^{N2}, SOR^{N2}, an N-protecting group, alkyl, alkenyl, alkynyl, alkoxy, aryl, alkaryl, cycloalkyl, alkcycloalkyl, carboxyalkyl, sulfoalkyl, heterocyclyl (e.g., heteroaryl), or alkheterocyclyl (e.g., alkheteroaryl), wherein each of these recited R^{N1} groups can be optionally substituted, as defined herein for each group; or two R^{N1} combine to form a heterocyclyl or an N-protecting group, and wherein each R^{N2} is, independently, H, alkyl, or aryl. The amino groups of the invention can be an unsubstituted amino (i.e., —NH₂) or a substituted amino (i.e., —N(R^{N1})₂). In a preferred embodiment, amino is —NH₂ or —NHR^{N1}, wherein R^{N1} is, independently, OH, NO₂, NH₂, NR^{N2}₂, SO₂OR^{N2}, SO₂R^{N2}, SOR^{N2}, alkyl, carboxyalkyl, sulfoalkyl, or aryl, and each R^{N2} can be H, C₁₋₂₀ alkyl (e.g., C₁₋₆ alkyl), or C₆₋₁₀ aryl.

[0891] The term “amino acid,” as described herein, refers to a molecule having a side chain, an amino group, and an acid group (e.g., a carboxy group of —CO₂H or a sulfo group of —SO₃H), wherein the amino acid is attached to the parent molecular group by the side chain, amino group, or acid group (e.g., the side chain). In some embodiments, the amino acid is attached to the parent molecular group by a carbonyl group, where the side chain or amino group is attached to the carbonyl group. Exemplary side chains include an optionally substituted alkyl, aryl, heterocyclyl, alkaryl, alkheterocyclyl, aminoalkyl, carbamoylalkyl, and carboxyalkyl. Exemplary amino acids include alanine, arginine, asparagine, aspartic acid, cysteine, glutamic acid, glutamine, glycine, histidine, hydroxynorvaline, isoleucine, leucine, lysine, methionine, norvaline, ornithine, phenylalanine, proline, pyrrolysine, selenocysteine, serine, taurine, threonine, tryptophan, tyrosine, and valine. Amino acid groups may be optionally substituted with one, two, three, or, in the case of amino acid groups of two carbons or more, four substituents independently selected from the group consisting of: (1) C₁₋₆ alkoxy; (2) C₁₋₆ alkylsulfinyl; (3) amino, as defined herein (e.g., unsubstituted amino (i.e., —NH₂) or a substituted amino (i.e., —N(R^{N1})₂, where R^{N1} is as defined for amino); (4) C₆₋₁₀ aryl-C₁₋₆ alkoxy; (5) azido; (6) halo; (7) (C₂₋₉ heterocyclyl)oxy; (8) hydroxy; (9) nitro; (10) oxo (e.g., carboxyaldehyde or acyl); (11) C₁₋₇ spirocyclyl; (12) thioalkoxy; (13) thiol; (14) —CO₂R^{A′}, where R^{A′} is selected from the group consisting of (a) C₁₋₂₀ alkyl (e.g., C₁₋₆ alkyl), (b) C₂₋₂₀ alkenyl (e.g., C₂₋₆ alkenyl), (c) C₆₋₁₀ aryl, (d) hydrogen, (e) C₁₋₆ alk-C₆₋₁₀ aryl, (f) amino-C₁₋₂₀ alkyl, (g) polyethylene glycol of —(CH₂)ₛ₂(OCH₂CH₂)ₛ₁(CH₂)ₛ₃OR′, wherein s1 is an integer from 1 to 10 (e.g., from 1 to 6 or from 1 to 4), each of s2 and s3, independently, is an integer from 0 to 10 (e.g., from 0 to 4, from 0 to 6, from 1 to 4, from 1 to 6, or from 1 to 10), and R′ is H or C₁₋₂₀ alkyl, and (h) amino-polyethylene glycol of —NR^{N1}(CH₂)ₛ₂(CH₂CH₂O)ₛ₁(CH₂)ₛ₃NR^{N1}, wherein s1 is an integer from 1 to 10 (e.g., from 1 to 6 or from 1 to 4), each of s2 and s3, independently, is an integer from 0 to 10 (e.g., from 0 to 4, from 0 to 6, from 1 to 4, from 1 to 6, or from 1 to 10), and each R^{N1} is, independently, hydrogen or optionally substituted C₁₋₆ alkyl; (15) —C(O)NR^{B′}R^{C′}, where each of R^{B′} and R^{C′} is, independently, selected from the group consisting of (a) hydrogen, (b) C₁₋₆ alkyl, (c) C₆₋₁₀ aryl, and (d) C₁₋₆ alk-C₆₋₁₀ aryl; (16) —SO₂R^{D′}, where R^{D′} is selected from the group consisting of (a) C₁₋₆ alkyl, (b) C₆₋₁₀ aryl, (c) C₁₋₆ alk-C₆₋₁₀ aryl, and (d) hydroxy; (17) —SO₂NR^{E′}R^{F′}, where each of R^{E′} and R^{F′} is, independently, selected from the group consisting of (a) hydrogen, (b) C₁₋₆ alkyl, (c) C₆₋₁₀ aryl and (d) C₁₋₆ alk-C₆₋₁₀ aryl; (18) —C(O)R^{G′}, where R^{G′} is selected from the group consisting of (a) C₁₋₂₀ alkyl (e.g., C₁₋₆ alkyl), (b) C₂₋₂₀ alkenyl (e.g., C₂₋₆ alkenyl), (c) C₆₋₁₀ aryl, (d) hydrogen, (e) C₁₋₆ alk-C₆₋₁₀ aryl, (f) amino-C₁₋₂₀ alkyl, (g) polyethylene glycol of —(CH₂)ₛ₂(OCH₂CH₂)ₛ₁(CH₂)ₛ₃OR′, wherein s1 is an integer from 1 to 10 (e.g., from 1 to 6 or from 1 to 4), each of s2 and s3, independently, is an integer from 0 to 10 (e.g., from 0 to 4, from 0 to 6, from 1 to 4, from 1 to 6, or from 1 to 10), and R′ is H or C₁₋₂₀ alkyl, and (h) amino-polyethylene glycol of —NR^{N1}(CH₂)ₛ₂(CH₂CH₂O)ₛ₁(CH₂)ₛ₃NR^{N1}, wherein s1 is an integer from 1 to 10 (e.g., from 1 to 6 or from 1 to 4), each of s2 and s3, independently, is an integer from 0 to 10 (e.g., from 0 to 4, from 0 to 6, from 1 to 4, from 1 to 6, or from 1 to 10), and each R^{N1} is, independently, hydrogen or optionally substituted C₁₋₆ alkyl; (19) —NR^{H}^{⁺}C(O)R^{I′}, wherein R^{H′} is selected from the group consisting of (a1) hydrogen and (b1) C₁₋₆ alkyl, and R^{I′} is selected from the group consisting of (a2) C₁₋₂₀ alkyl (e.g., C₁₋₆ alkyl), (b2) C₂₋₂₀ alkenyl (e.g., C₂₋₆ alkenyl), (c2) C₆₋₁₀ aryl, (d2) hydrogen, (e2) C₁₋₆ alk-C₆₋₁₀ aryl, (f2) amino-C₁₋₂₀ alkyl, (g2) polyethylene glycol of —(CH₂)ₛ₂(OCH₂CH₂)ₛ₁(CH₂)ₛ₃OR′, wherein s1 is an integer from 1 to 10 (e.g., from 1 to 6 or from 1 to 4), each of s2 and s3, independently, is an integer from 0 to 10 (e.g., from 0 to 4, from 0 to 6, from 1 to 4, from 1 to 6, or from 1 to 10), and R′ is H or C₁₋₂₀ alkyl, and (h2) amino-polyethylene glycol of —NR^{N1}(CH₂)ₛ₂(CH₂CH₂O)ₛ₁(CH₂)ₛ₃NR^{N1}, wherein s1 is an integer from 1 to 10 (e.g., from 1 to 6 or from 1 to 4), each of s2 and s3, independently, is an integer from 0 to 10 (e.g., from 0 to 4, from 0 to 6, from 1 to 4, from 1 to 6, or from 1 to 10), and each R^{N1} is, independently, hydrogen or optionally substituted C₁₋₆ alkyl; (20) —NR^{J′}C(O)OR^{K′}, wherein R^{J′} is selected from the group consisting of (a1) hydrogen and (b1) C₁₋₆ alkyl, and R^{K′} is selected from the group consisting of (a2) C₁₋₂₀ alkyl (e.g., C₁₋₆ alkyl), (b2) C2-20 alkenyl (e.g., C₂₋₆ alkenyl), (c2) C₆₋₁₀ aryl, (d2) hydrogen, (e2) C₁₋₆ alk-C₆₋₁₀ aryl, (f2) amino-C₁₋₂₀ alkyl, (g2) polyethylene glycol of —(CH₂)ₛ₂(OCH₂CH₂)ₛ₁(CH₂)ₛ₃OR′, wherein s1 is an integer from 1 to 10 (e.g., from 1 to 6 or from 1 to 4), each of s2 and s3, independently, is an integer from 0 to 10 (e.g., from 0 to 4, from 0 to 6, from 1 to 4, from 1 to 6, or from 1 to 10), and R′ is H or C₁₋₂₀ alkyl, and (h2) amino-polyethylene glycol of —NR^{N1}(CH₂)ₛ₂(CH₂CH₂O)ₛ₁(CH₂)ₛ₃NR^{N1}, wherein s1 is an integer from 1 to 10 (e.g., from 1 to 6 or from 1 to 4), each of s2 and s3, independently, is an integer from 0 to 10 (e.g., from 0 to 4, from 0 to 6, from 1 to 4, from 1 to 6, or from 1 to 10), and each R^{N1} is, independently, hydrogen or optionally substituted C₁₋₆ alkyl; and (21) amidine. In some embodiments, each of these groups can be further substituted as described herein.

[0892] The term “aminoalkoxy,” as used herein, represents an alkoxy group, as defined herein, substituted by an amino group, as defined herein. The alkyl and amino each can be further substituted with 1, 2, 3, or 4 substituent groups as described herein for the respective group (e.g., CO₂R^{A′}, where R^{A′} is selected from the group consisting of (a) C₁₋₆ alkyl, (b) C₆₋₁₀ aryl, (c) hydrogen, and (d) C₁₋₆ alk-C₆₋₁₀ aryl, e.g., carboxy).

[0893] The term “aminoalkyl,” as used herein, represents an alkyl group, as defined herein, substituted by an amino group, as defined herein. The alkyl and amino each can be further substituted with 1, 2, 3, or 4 substituent groups as described herein for the respective group (e.g., CO₂R^{A′}, where R^{A′} is selected from the group consisting of (a) C₁₋₆ alkyl, (b) C₆₋₁₀ aryl, (c) hydrogen, and (d) C₁₋₆ alk-C₆₋₁₀ aryl, e.g., carboxy).

[0894] The term “aryl,” as used herein, represents a mono-, bicyclic, or multicyclic carbocyclic ring system having one or two aromatic rings and is exemplified by phenyl, naphthyl, 1,2-dihydronaphthyl, 1,2,3,4-tetrahydronaphthyl, anthracenyl, phenanthrenyl, fluorenyl, indanyl, indenyl, and the like, and may be optionally substituted with 1, 2, 3, 4, or 5 substituents independently selected from the group consisting of: (1) C₁₋₇ acyl (e.g., carboxyaldehyde); (2) C₁₋₂₀ alkyl (e.g., C₁₋₆ alkyl, C₁₋₆ alkoxy-C₁₋₆ alkyl, C₁₋₆ alkylsulfinyl-C₁₋₆ alkyl, amino-C₁₋₆ alkyl, azido-C₁₋₆ alkyl, (carboxyaldehyde)-C₁₋₆ alkyl, halo-C₁₋₆ alkyl (e.g., perfluoroalkyl), hydroxy-C₁₋₆ alkyl, nitro-C₁₋₆ alkyl, or C₁₋₆ thioalkoxy-C₁₋₆ alkyl); (3) C₁₋₂₀ alkoxy (e.g., C₁₋₆ alkoxy, such as perfluoroalkoxy); (4) C₁₋₆ alkylsulfinyl; (5) C₆₋₁₀ aryl; (6) amino; (7) C₁₋₆ alk-C₆₋₁₀ aryl; (8) azido; (9) C₃₋₈ cycloalkyl; (10) C₁₋₆ alk-C₃₋₈ cycloalkyl; (11) halo; (12) C₁₋₁₂ heterocyclyl (e.g., C₁₋₁₂ heteroaryl); (13) (C₁₋₁₂ heterocyclyl)oxy; (14) hydroxy; (15) nitro; (16) C₁₋₂₀ thioalkoxy (e.g., C₁₋₆ thioalkoxy); (17) —(CH₂)_{q}CO₂R^{A′}, where q is an integer from zero to four, and R^{A′} is selected from the group consisting of (a) C₁₋₆ alkyl, (b) C₆₋₁₀ aryl, (c) hydrogen, and (d) C₁₋₆ alk-C₆₋₁₀ aryl; (18) —(CH₂)_{q}CONR^{B′}R^{C′}, where q is an integer from zero to four and where R^{B′} and R^{C′} are independently selected from the group consisting of (a) hydrogen, (b) C₁₋₆ alkyl, (c) C₆₋₁₀ aryl, and (d) C₁₋₆ alk-C₆₋₁₀ aryl; (19) —(CH₂)_{q}SO₂R^{D′}, where q is an integer from zero to four and where R^{D′} is selected from the group consisting of (a) alkyl, (b) C₆₋₁₀ aryl, and (c) alk-C₆₋₁₀ aryl; (20) —(CH₂)_{q}SO₂NR^{E′}R^{F′}, where q is an integer from zero to four and where each of R^{E′} and R^{F′} is, independently, selected from the group consisting of (a) hydrogen, (b) C₁₋₆ alkyl, (c) C₆₋₁₀ aryl, and (d) C₁₋₆ alk-C₆₋₁₀ aryl; (21) thiol; (22) C₆₋₁₀ aryloxy; (23) C₃₋₈ cycloalkoxy; (24) C₆₋₁₀ aryl-C₁₋₆ alkoxy; (25) C₁₋₆ alk-C₁₋₁₂ heterocyclyl (e.g., C₁₋₆ alk-C₁₋₁₂ heteroaryl); (26) C₂₋₂₀ alkenyl; and (27) C₂₋₂₀ alkynyl. In some embodiments, each of these groups can be further substituted as described herein. For example, the alkylene group of a C₁-alkaryl or a C₁-alkheterocyclyl can be further substituted with an oxo group to afford the respective aryloyl and (heterocyclyl)oyl substituent group.

[0895] The term “arylalkoxy,” as used herein, represents an alkaryl group, as defined herein, attached to the parent molecular group through an oxygen atom. Exemplary unsubstituted alkoxyalkyl groups include from 7 to 30 carbons (e.g., from 7 to 16 or from 7 to 20 carbons, such as C₆₋₁₀ aryl-C₁₋₆ alkoxy, C₆₋₁₀ aryl-C₁₋₁₀ alkoxy, or C₆₋₁₀ aryl-C₁₋₂₀ alkoxy). In some embodiments, the arylalkoxy group can be substituted with 1, 2, 3, or 4 substituents as defined herein

[0896] The term “aryloxy” represents a chemical substituent of formula —OR′, where R′ is an aryl group of 6 to 18 carbons, unless otherwise specified. In some embodiments, the aryl group can be substituted with 1, 2, 3, or 4 substituents as defined herein.

[0897] The term “aryloyl,” as used herein, represents an aryl group, as defined herein, that is attached to the parent molecular group through a carbonyl group. Exemplary unsubstituted aryloyl groups are of 7 to 11 carbons. In some embodiments, the aryl group can be substituted with 1, 2, 3, or 4 substituents as defined herein.

[0898] The term “azido” represents an —N₃ group, which can also be represented as —N═N═N.

[0899] The term “bicyclic,” as used herein, refer to a structure having two rings, which may be aromatic or non-aromatic. Bicyclic structures include spirocyclyl groups, as defined herein, and two rings that share one or more bridges, where such bridges can include one atom or a chain including two, three, or more atoms. Exemplary bicyclic groups include a bicyclic carbocyclyl group, where the first and second rings are carbocyclyl groups, as defined herein; a bicyclic aryl groups, where the first and second rings are aryl groups, as defined herein; bicyclic heterocyclyl groups, where the first ring is a heterocyclyl group and the second ring is a carbocyclyl (e.g., aryl) or heterocyclyl (e.g., heteroaryl) group; and bicyclic heteroaryl groups, where the first ring is a heteroaryl group and the second ring is a carbocyclyl (e.g., aryl) or heterocyclyl (e.g., heteroaryl) group. In some embodiments, the bicyclic group can be substituted with 1, 2, 3, or 4 substituents as defined herein for cycloalkyl, heterocyclyl, and aryl groups.

[0900] The terms “carbocyclic” and “carbocyclyl,” as used herein, refer to an optionally substituted C₃₋₁₂ monocyclic, bicyclic, or tricyclic structure in which the rings, which may be aromatic or non-aromatic, are formed by carbon atoms. Carbocyclic structures include cycloalkyl, cycloalkenyl, and aryl groups.

[0901] The term “carbamoyl,” as used herein, represents —C(O)—N(R^{N1})₂, where the meaning of each R^{N1} is found in the definition of “amino” provided herein.

[0902] The term “carbamoylalkyl,” as used herein, represents an alkyl group, as defined herein, substituted by a carbamoyl group, as defined herein. The alkyl group can be further substituted with 1, 2, 3, or 4 substituent groups as described herein.

[0903] The term “carbamyl,” as used herein, refers to a carbamate group having the structure

—NR^{N1}C(═O)OR or —OC(═O)N(R^{N1})₂, where the meaning of each R^{N1} is found in the definition of “amino” provided herein, and R is alkyl, cycloalkyl, alkcycloalkyl, aryl, alkaryl, heterocyclyl (e.g., heteroaryl), or alkheterocyclyl (e.g., alkheteroaryl), as defined herein.

[0904] The term “carbonyl,” as used herein, represents a C(O) group, which can also be represented as C═O.

[0905] The term “carboxyaldehyde” represents an acyl group having the structure —CHO.

[0906] The term “carboxy,” as used herein, means —CO₂H.

[0907] The term “carboxyalkoxy,” as used herein, represents an alkoxy group, as defined herein, substituted by a carboxy group, as defined herein. The alkoxy group can be further substituted with 1, 2, 3, or 4 substituent groups as described herein for the alkyl group.

[0908] The term “carboxyalkyl,” as used herein, represents an alkyl group, as defined herein, substituted by a carboxy group, as defined herein. The alkyl group can be further substituted with 1, 2, 3, or 4 substituent groups as described herein.

[0909] The term “cyano,” as used herein, represents an —CN group.

[0910] The term “cycloalkoxy” represents a chemical substituent of formula —OR, where R is a C₃₋₈ cycloalkyl group, as defined herein, unless otherwise specified. The cycloalkyl group can be further substituted with 1, 2, 3, or 4 substituent groups as described herein. Exemplary unsubstituted cycloalkoxy groups are from 3 to 8 carbons. In some embodiment, the cycloalkyl group can be further substituted with 1, 2, 3, or 4 substituent groups as described herein.

[0911] The term “cycloalkyl,” as used herein represents a monovalent saturated or unsaturated non-aromatic cyclic hydrocarbon group from three to eight carbons, unless otherwise specified, and is exemplified by cyclopropyl, cyclobutyl, cyclopentyl, cyclohexyl, cycloheptyl, bicyclo[2.2.1]heptyl, and the like. When the cycloalkyl group includes one carbon-carbon double bond, the cycloalkyl group can be referred to as a “cycloalkenyl” group. Exemplary cycloalkenyl groups include cyclopentenyl, cyclohexenyl, and the like. The cycloalkyl groups of this invention can be optionally substituted with: (1) C₁₋₇ acyl (e.g., carboxyaldehyde); (2) C₁₋₂₀ alkyl (e.g., C₁₋₆ alkyl, C₁₋₆ alkoxy-C₁₋₆ alkyl, C₁₋₆ alkylsulfinyl-C₁₋₆ alkyl, amino-C₁₋₆ alkyl, azido-C₁₋₆ alkyl, (carboxyaldehyde)-C₁₋₆ alkyl, halo-C₁₋₆ alkyl (e.g., perfluoroalkyl), hydroxy-C₁₋₆ alkyl, nitro-C₁₋₆ alkyl, or C₁₋₆ thioalkoxy-C₁₋₆ alkyl); (3) C₁₋₂₀ alkoxy (e.g., C₁₋₆ alkoxy, such as perfluoroalkoxy); (4) C₁₋₆ alkylsulfinyl; (5) C₆₋₁₀ aryl; (6) amino; (7) C₁₋₆ alk-C₆₋₁₀ aryl; (8) azido; (9) C₃₋₈ cycloalkyl; (10) C₁₋₆ alk-C₃₋₈ cycloalkyl; (11) halo; (12) C₁₋₁₂ heterocyclyl (e.g., C₁₋₁₂ heteroaryl); (13) (C₁₋₁₂ heterocyclyl)oxy; (14) hydroxy; (15) nitro; (16) C₁₋₂₀ thioalkoxy (e.g., C₁₋₆ thioalkoxy); (17) —(CH₂)_{q}CO₂R^{A′}, where q is an integer from zero to four, and R^{A′} is selected from the group consisting of (a) C₁₋₆ alkyl, (b) C₆₋₁₀ aryl, (c) hydrogen, and (d) C₁₋₆ alk-C₆₋₁₀ aryl; (18) —(CH₂)_{q}CONR^{B′}R^{C′}, where q is an integer from zero to four and where R^{B′} and R^{C′} are independently selected from the group consisting of (a) hydrogen, (b) C₆₋₁₀ alkyl, (c) C₆₋₁₀ aryl, and (d) C₁₋₆ alk-C₆₋₁₀ aryl; (19) —(CH₂)_{q}SO₂R^{D′}, where q is an integer from zero to four and where R^{D′} is selected from the group consisting of (a) C₆₋₁₀ alkyl, (b) C₆₋₁₀ aryl, and (c) C₁₋₆ alk-C₆₋₁₀ aryl; (20) —(CH₂)_{q}SO₂NR^{E′}R^{F′}, where q is an integer from zero to four and where each of R^{E′} and R^{F′} is, independently, selected from the group consisting of (a) hydrogen, (b) C₆₋₁₀ alkyl, (c) C₆₋₁₀ aryl, and (d) C₁₋₆ alk-C₆₋₁₀ aryl; (21) thiol; (22) C₆₋₁₀ aryloxy; (23) C₃₋₈ cycloalkoxy; (24) C₆₋₁₀ aryl-C₁₋₆ alkoxy; (25) C₁₋₆ alk-C₁₋₁₂ heterocyclyl (e.g., C₁₋₆ alk-C₁₋₁₂ heteroaryl); (26) oxo; (27) C₂₋₂₀ alkenyl; and (28) C₂₋₂₀ alkynyl. In some embodiments, each of these groups can be further substituted as described herein. For example, the alkylene group of a C₁-alkaryl or a C₁-alkheterocyclyl can be further substituted with an oxo group to afford the respective aryloyl and (heterocyclyl)oyl substituent group.

[0912] The term “diastereomer,” as used herein means stereoisomers that are not mirror images of one another and are non-superimposable on one another.

[0913] The term “effective amount” of an agent, as used herein, is that amount sufficient to effect beneficial or desired results, for example, clinical results, and, as such, an “effective amount” depends upon the context in which it is being applied. For example, in the context of administering an agent that treats cancer, an effective amount of an agent is, for example, an amount sufficient to achieve treatment, as defined herein, of cancer, as compared to the response obtained without administration of the agent.

[0914] The term “enantiomer,” as used herein, means each individual optically active form of a compound of the invention, having an optical purity or enantiomeric excess (as determined by methods standard in the art) of at least 80% (i.e., at least 90% of one enantiomer and at most 10% of the other enantiomer), preferably at least 90% and more preferably at least 98%.

[0915] The term “halo,” as used herein, represents a halogen selected from bromine, chlorine, iodine, or fluorine.

[0916] The term “haloalkoxy,” as used herein, represents an alkoxy group, as defined herein, substituted by a halogen group (i.e., F, Cl, Br, or I). A haloalkoxy may be substituted with one, two, three, or, in the case of alkyl groups of two carbons or more, four halogens. Haloalkoxy groups include perfluoroalkoxys (e.g., —OCF₃), —OCHF₂, —OCH₂F, —OCCl₃, —OCH₂CH₂Br, —OCH₂CH(CH₂CH₂Br)CH₃, and —OCHICH₃. In some embodiments, the haloalkoxy group can be further substituted with 1, 2, 3, or 4 substituent groups as described herein for alkyl groups.

[0917] The term “haloalkyl,” as used herein, represents an alkyl group, as defined herein, substituted by a halogen group (i.e., F, Cl, Br, or I). A haloalkyl may be substituted with one, two, three, or, in the case of alkyl groups of two carbons or more, four halogens. Haloalkyl groups include perfluoroalkyls (e.g., —CF₃), —CHF₂, —CH₂F, —CCl₃, —CH₂CH₂Br, —CH₂CH(CH₂CH₂Br)CH₃, and —CHICH₃. In some embodiments, the haloalkyl group can be further substituted with 1, 2, 3, or 4 substituent groups as described herein for alkyl groups.

[0918] The term “heteroalkylene,” as used herein, refers to an alkylene group, as defined herein, in which one or two of the constituent carbon atoms have each been replaced by nitrogen, oxygen, or sulfur. In some embodiments, the heteroalkylene group can be further substituted with 1, 2, 3, or 4 substituent groups as described herein for alkylene groups.

[0919] The term “heteroaryl,” as used herein, represents that subset of heterocyclyls, as defined herein, which are aromatic: i.e., they contain 4n+2 pi electrons within the mono- or multicyclic ring system. Exemplary unsubstituted heteroaryl groups are of 1 to 12 (e.g., 1 to 11, 1 to 10, 1 to 9, 2 to 12, 2 to 11, 2 to 10, or 2 to 9) carbons. In some embodiment, the heteroaryl is substituted with 1, 2, 3, or 4 substituents groups as defined for a heterocyclyl group.

[0920] The term “heterocyclyl,” as used herein represents a 5-, 6- or 7-membered ring, unless otherwise specified, containing one, two, three, or four heteroatoms independently selected from the group consisting of nitrogen, oxygen, and sulfur. The 5-membered ring has zero to two double bonds, and the 6- and 7-membered rings have zero to three double bonds. Exemplary unsubstituted heterocyclyl groups are of 1 to 12 (e.g., 1 to 11, 1 to 10, 1 to 9, 2 to 12, 2 to 11, 2 to 10, or 2 to 9) carbons. The term “heterocyclyl” also represents a heterocyclic compound having a bridged multicyclic structure in which one or more carbons and/or heteroatoms bridges two non-adjacent members of a monocyclic ring, e.g., a quinuclidinyl group. The term “heterocyclyl” includes bicyclic, tricyclic, and tetracyclic groups in which any of the above heterocyclic rings is fused to one, two, or three carbocyclic rings, e.g., an aryl ring, a cyclohexane ring, a cyclohexene ring, a cyclopentane ring, a cyclopentene ring, or another monocyclic heterocyclic ring, such as indolyl, quinolyl, isoquinolyl, tetrahydroquinolyl, benzofuryl, benzothienyl and the like. Examples of fused heterocyclyls include tropanes and 1,2,3,5,8,8a-hexahydroindolizine. Heterocyclics include pyrrolyl, pyrrolinyl, pyrrolidinyl, pyrazolyl, pyrazolinyl, pyrazolidinyl, imidazolyl, imidazolinyl, imidazolidinyl, pyridyl, piperidinyl, homopiperidinyl, pyrazinyl, piperazinyl, pyrimidinyl, pyridazinyl, oxazolyl, oxazolidinyl, isoxazolyl, isoxazolidiniyl, morpholinyl, thiomorpholinyl, thiazolyl, thiazolidinyl, isothiazolyl, isothiazolidinyl, indolyl, indazolyl, quinolyl, isoquinolyl, quinoxalinyl, dihydroquinoxalinyl, quinazolinyl, cinnolinyl, phthalazinyl, benzimidazolyl, benzothiazolyl, benzoxazolyl, benzothiadiazolyl, furyl, thienyl, thiazolidinyl, isothiazolyl, triazolyl, tetrazolyl, oxadiazolyl (e.g., 1,2,3-oxadiazolyl), purinyl, thiadiazolyl (e.g., 1,2,3-thiadiazolyl), tetrahydrofuranyl, dihydrofuranyl, tetrahydrothienyl, dihydrothienyl, dihydroindolyl, dihydroquinolyl, tetrahydroquinolyl, tetrahydroisoquinolyl, dihydroisoquinolyl, pyranyl, dihydropyranyl, dithiazolyl, benzofuranyl, isobenzofuranyl, benzothienyl, and the like, including dihydro and tetrahydro forms thereof, where one or more double bonds are reduced and replaced with hydrogens. Still other exemplary heterocyclyls include: 2,3,4,5-tetrahydro-2-oxo-oxazolyl; 2,3-dihydro-2-oxo-1H-imidazolyl; 2,3,4,5-tetrahydro-5-oxo-1H-pyrazolyl (e.g., 2,3,4,5-tetrahydro-2-phenyl-5-oxo-1H-pyrazolyl); 2,3,4,5-tetrahydro-2,4-dioxo-1H-imidazolyl (e.g., 2,3,4,5-tetrahydro-2,4-dioxo-5-methyl-5-phenyl-1H-imidazolyl); 2,3-dihydro-2-thioxo-1,3,4-oxadiazolyl (e.g., 2,3-dihydro-2-thioxo-5-phenyl-1,3,4-oxadiazolyl); 4,5-dihydro-5-oxo-1H-triazolyl (e.g., 4,5-dihydro-3-methyl-4-amino 5-oxo-1H-triazolyl); 1,2,3,4-tetrahydro-2,4-dioxopyridinyl (e.g., 1,2,3,4-tetrahydro-2,4-dioxo-3,3-diethylpyridinyl); 2,6-dioxo-piperidinyl (e.g., 2,6-dioxo-3-ethyl-3-phenylpiperidinyl); 1,6-dihydro-6-oxopyridiminyl; 1,6-dihydro-4-oxopyrimidinyl (e.g., 2-(methylthio)-1,6-dihydro-4-oxo-5-methylpyrimidin-1-yl); 1,2,3,4-tetrahydro-2,4-dioxopyrimidinyl (e.g., 1,2,3,4-tetrahydro-2,4-dioxo-3-ethylpyrimidinyl); 1,6-dihydro-6-oxo-pyridazinyl (e.g., 1,6-dihydro-6-oxo-3-ethylpyridazinyl); 1,6-dihydro-6-oxo-1,2,4-triazinyl (e.g., 1,6-dihydro-5-isopropyl-6-oxo-1,2,4-triazinyl); 2,3-dihydro-2-oxo-1H-indolyl (e.g., 3,3-dimethyl-2,3-dihydro-2-oxo-1H-indolyl and 2,3-dihydro-2-oxo-3,3′-spiropropane-1H-indol-1-yl); 1,3-dihydro-1-oxo-2H-iso-indolyl; 1,3-dihydro-1,3-dioxo-2H-iso-indolyl; 1H-benzopyrazolyl (e.g., 1-(ethoxycarbonyl)-1H-benzopyrazolyl); 2,3-dihydro-2-oxo-1H-benzimidazolyl (e.g., 3-ethyl-2,3-dihydro-2-oxo-1H-benzimidazolyl); 2,3-dihydro-2-oxo-benzoxazolyl (e.g., 5-chloro-2,3-dihydro-2-oxo-benzoxazolyl); 2,3-dihydro-2-oxo-benzoxazolyl; 2-oxo-2H-benzopyranyl; 1,4-benzodioxanyl; 1,3-benzodioxanyl; 2,3-dihydro-3-oxo,4H-1,3-benzothiazinyl; 3,4-dihydro-4-oxo-3H-quinazolinyl (e.g., 2-methyl-3,4-dihydro-4-oxo-3H-quinazolinyl); 1,2,3,4-tetrahydro-2,4-dioxo-3H-quinazolyl (e.g., 1-ethyl-1,2,3,4-tetrahydro-2,4-dioxo-3H-quinazolyl); 1,2,3,6-tetrahydro-2,6-dioxo-7H-purinyl (e.g., 1,2,3,6-tetrahydro-1,3-dimethyl-2,6-dioxo-7H-purinyl); 1,2,3,6-tetrahydro-2,6-dioxo-1H-purinyl (e.g., 1,2,3,6-tetrahydro-3,7-dimethyl-2,6-dioxo-1H-purinyl); 2-oxobenz[c,d]indolyl; 1,1-dioxo-2H-naphth[1,8-c,d]isothiazolyl; and 1,8-naphthylenedicarboxamido. Additional heterocyclics include 3,3a,4,5,6,6a-hexahydro-pyrrolo[3,4-b]pyrrol-(2H)-yl, and 2,5-diazabicyclo[2.2.1]heptan-2-yl, homopiperazinyl (or diazepanyl), tetrahydropyranyl, dithiazolyl, benzofuranyl, benzothienyl, oxepanyl, thiepanyl, azocanyl, oxecanyl, and thiocanyl. Heterocyclic groups also include groups of the formula

[chemical structure]

where E′ is selected from the group consisting of —N— and —CH—; F′ is selected from the group consisting of —N═CH—, —NH—CH₂—, —NH—C(O)—, —NH—, —CH═N—, —CH₂—NH—, —C(O)—NH—, —CH═CH—, —CH₂—, —CH₂CH₂—, —CH₂O—, —OCH₂—, —O—, and —S—; and G′ is selected from the group consisting of —CH— and —N—. Any of the heterocyclyl groups mentioned herein may be optionally substituted with one, two, three, four or five substituents independently selected from the group consisting of: (1) C₁₋₇ acyl (e.g., carboxyaldehyde); (2) C₁₋₂₀ alkyl (e.g., C₁₋₆ alkyl, C₁₋₆ alkoxy-C₁₋₆ alkyl, C₁₋₆ alkylsulfinyl-C₁₋₆ alkyl, amino-C₁₋₆ alkyl, azido-C₁₋₆ alkyl, (carboxyaldehyde)-C₁₋₆ alkyl, halo-C₁₋₆ alkyl (e.g., perfluoroalkyl), hydroxy-C₁₋₆ alkyl, nitro-C₁₋₆ alkyl, or C₁₋₆ thioalkoxy-C₁₋₆ alkyl); (3) C₁₋₂₀ alkoxy (e.g., C₁₋₆ alkoxy, such as perfluoroalkoxy); (4) C₁₋₆ alkylsulfinyl; (5) C₆₋₁₀ aryl; (6) amino; (7) C₁₋₆ alk-C₆₋₁₀ aryl; (8) azido; (9) C₃₋₈ cycloalkyl; (10) C₁₋₆ alk-C₃₋₈ cycloalkyl; (11) halo; (12) C₁₋₁₂ heterocyclyl (e.g., C₂₋₁₂ heteroaryl); (13) (C₁₋₁₂ heterocyclyl)oxy; (14) hydroxy; (15) nitro; (16) C₁₋₂₀ thioalkoxy (e.g., C₁₋₆ thioalkoxy); (17) —(CH₂)_{q}CO₂R^{A′}, where q is an integer from zero to four, and R^{A′} is selected from the group consisting of (a) C₁₋₆ alkyl, (b) C₆₋₁₀ aryl, (c) hydrogen, and (d) C₁₋₆ alk-C₆₋₁₀ aryl; (18) —(CH₂)_{q}CONR^{B′}R^{C′}, where q is an integer from zero to four and where R^{B′} and R^{C′} are independently selected from the group consisting of (a) hydrogen, (b) C₁₋₆ alkyl, (c) C₆₋₁₀ aryl, and (d) C₁₋₆ alk-C₆₋₁₀ aryl; (19) —(CH₂)_{q}SO₂R^{D′}, where q is an integer from zero to four and where R^{D′} is selected from the group consisting of (a) C₁₋₆ alkyl, (b) C₆₋₁₀ aryl, and (c) C₁₋₆ alk-C₆₋₁₀ aryl; (20) —(CH₂)_{q}SO₂NR^{E′}R^{F′}, where q is an integer from zero to four and where each of R^{E′} and R^{F′} is, independently, selected from the group consisting of (a) hydrogen, (b) C₁₋₆ alkyl, (c) C₆₋₁₀ aryl, and (d) C₁₋₆ alk-C₆₋₁₀ aryl; (21) thiol; (22) C₆₋₁₀ aryloxy; (23) C₃₋₈ cycloalkoxy; (24) arylalkoxy; (25) C₁₋₆ alk-C₁₋₁₂ heterocyclyl (e.g., C₁₋₆ alk-C₁₋₁₂ heteroaryl); (26) oxo; (27) (C₁₋₁₂ heterocyclyl)imino; (28) C₂₋₂₀ alkenyl; and (29) C₂₋₂₀ alkynyl. In some embodiments, each of these groups can be further substituted as described herein. For example, the alkylene group of a C₁-alkaryl or a C₁-alkheterocyclyl can be further substituted with an oxo group to afford the respective aryloyl and (heterocyclyl)oyl substituent group.

[0921] The term “(heterocyclyl)imino,” as used herein, represents a heterocyclyl group, as defined herein, attached to the parent molecular group through an imino group. In some embodiments, the heterocyclyl group can be substituted with 1, 2, 3, or 4 substituent groups as defined herein.

[0922] The term “(heterocyclyl)oxy,” as used herein, represents a heterocyclyl group, as defined herein, attached to the parent molecular group through an oxygen atom. In some embodiments, the heterocyclyl group can be substituted with 1, 2, 3, or 4 substituent groups as defined herein.

[0923] The term “(heterocyclyl)oyl,” as used herein, represents a heterocyclyl group, as defined herein, attached to the parent molecular group through a carbonyl group. In some embodiments, the heterocyclyl group can be substituted with 1, 2, 3, or 4 substituent groups as defined herein.

[0924] The term “hydrocarbon,” as used herein, represents a group consisting only of carbon and hydrogen atoms.

[0925] The term “hydroxy,” as used herein, represents an —OH group.

[0926] The term “hydroxyalkenyl,” as used herein, represents an alkenyl group, as defined herein, substituted by one to three hydroxy groups, with the proviso that no more than one hydroxy group may be attached to a single carbon atom of the alkyl group, and is exemplified by dihydroxypropenyl, hydroxyisopentenyl, and the like.

[0927] The term “hydroxyalkyl,” as used herein, represents an alkyl group, as defined herein, substituted by one to three hydroxy groups, with the proviso that no more than one hydroxy group may be attached to a single carbon atom of the alkyl group, and is exemplified by hydroxymethyl, dihydroxypropyl, and the like.

[0928] The term “isomer,” as used herein, means any tautomer, stereoisomer, enantiomer, or diastereomer of any compound of the invention. It is recognized that the compounds of the invention can have one or more chiral centers and/or double bonds and, therefore, exist as stereoisomers, such as double-bond isomers (i.e., geometric E/Z isomers) or diastereomers (e.g., enantiomers (i.e., (+) or (−)) or cis/trans isomers). According to the invention, the chemical structures depicted herein, and therefore the compounds of the invention, encompass all of the corresponding stereoisomers, that is, both the stereomerically pure form (e.g., geometrically pure, enantiomerically pure, or diastereomerically pure) and enantiomeric and stereoisomeric mixtures, e.g., racemates. Enantiomeric and stereoisomeric mixtures of compounds of the invention can typically be resolved into their component enantiomers or stereoisomers by well-known methods, such as chiral-phase gas chromatography, chiral-phase high performance liquid chromatography, crystallizing the compound as a chiral salt complex, or crystallizing the compound in a chiral solvent. Enantiomers and stereoisomers can also be obtained from stereomerically or enantiomerically pure intermediates, reagents, and catalysts by well-known asymmetric synthetic methods.

[0929] The term “N-protected amino,” as used herein, refers to an amino group, as defined herein, to which is attached one or two N-protecting groups, as defined herein.

[0930] The term “N-protecting group,” as used herein, represents those groups intended to protect an amino group against undesirable reactions during synthetic procedures. Commonly used N-protecting groups are disclosed in Greene, “Protective Groups in Organic Synthesis,” 3^{rd} Edition (John Wiley & Sons, New York, 1999), which is incorporated herein by reference. N-protecting groups include acyl, aryloyl, or carbamyl groups such as formyl, acetyl, propionyl, pivaloyl, t-butylacetyl, 2-chloroacetyl, 2-bromoacetyl, trifluoroacetyl, trichloroacetyl, phthalyl, o-nitrophenoxyacetyl, α-chlorobutyryl, benzoyl, 4-chlorobenzoyl, 4-bromobenzoyl, 4-nitrobenzoyl, and chiral auxiliaries such as protected or unprotected D, L or D, L-amino acids such as alanine, leucine, phenylalanine, and the like; sulfonyl-containing groups such as benzenesulfonyl, p-toluenesulfonyl, and the like; carbamate forming groups such as benzyloxycarbonyl, p-chlorobenzyloxycarbonyl, p-methoxybenzyloxycarbonyl, p-nitrobenzyloxycarbonyl, 2-nitrobenzyloxycarbonyl, p-bromobenzyloxycarbonyl, 3,4-dimethoxybenzyloxycarbonyl, 3,5-dimethoxybenzyloxycarbonyl, 2,4-dimethoxybenzyloxycarbonyl, 4-methoxybenzyloxycarbonyl, 2-nitro-4,5-dimethoxybenzyloxycarbonyl, 3,4,5-trimethoxybenzyloxycarbonyl, 1-(p-biphenylyl)-1-methylethoxycarbonyl, α,α-dimethyl-3,5-dimethoxybenzyloxycarbonyl, benzhydryloxy carbonyl, t-butyloxycarbonyl, diisopropylmethoxycarbonyl, isopropyloxycarbonyl, ethoxycarbonyl, methoxycarbonyl, allyloxycarbonyl, 2,2,2,-trichloroethoxycarbonyl, phenoxycarbonyl, 4-nitrophenoxy carbonyl, fluorenyl-9-methoxycarbonyl, cyclopentyloxycarbonyl, adamantyloxycarbonyl, cyclohexyloxycarbonyl, phenylthiocarbonyl, and the like, alkaryl groups such as benzyl, triphenylmethyl, benzyloxymethyl, and the like and silyl groups, such as trimethylsilyl, and the like. Preferred N-protecting groups are formyl, acetyl, benzoyl, pivaloyl, t-butylacetyl, alanyl, phenylsulfonyl, benzyl, t-butyloxycarbonyl (Boc), and benzyloxycarbonyl (Cbz).

[0931] The term “nitro,” as used herein, represents an —NO₂ group.

[0932] The term “oxo” as used herein, represents ═O.

[0933] The term “perfluoroalkyl,” as used herein, represents an alkyl group, as defined herein, where each hydrogen radical bound to the alkyl group has been replaced by a fluoride radical. Perfluoroalkyl groups are exemplified by trifluoromethyl, pentafluoroethyl, and the like.

[0934] The term “perfluoroalkoxy,” as used herein, represents an alkoxy group, as defined herein, where each hydrogen radical bound to the alkoxy group has been replaced by a fluoride radical. Perfluoroalkoxy groups are exemplified by trifluoromethoxy, pentafluoroethoxy, and the like.

[0935] The term “spirocyclyl,” as used herein, represents a C₂₋₇ alkylene diradical, both ends of which are bonded to the same carbon atom of the parent group to form a spirocyclic group, and also a C₁₋₆ heteroalkylene diradical, both ends of which are bonded to the same atom. The heteroalkylene radical forming the spirocyclyl group can containing one, two, three, or four heteroatoms independently selected from the group consisting of nitrogen, oxygen, and sulfur. In some embodiments, the spirocyclyl group includes one to seven carbons, excluding the carbon atom to which the diradical is attached. The spirocyclyl groups of the invention may be optionally substituted with 1, 2, 3, or 4 substituents provided herein as optional substituents for cycloalkyl and/or heterocyclyl groups.

[0936] The term “stereoisomer,” as used herein, refers to all possible different isomeric as well as conformational forms which a compound may possess (e.g., a compound of any formula described herein), in particular all possible stereochemically and conformationally isomeric forms, all diastereomers, enantiomers and/or conformers of the basic molecular structure. Some compounds of the present invention may exist in different tautomeric forms, all of the latter being included within the scope of the present invention.

[0937] The term “sulfoalkyl,” as used herein, represents an alkyl group, as defined herein, substituted by a sulfo group of —SO₃H. In some embodiments, the alkyl group can be further substituted with 1, 2, 3, or 4 substituent groups as described herein.

[0938] The term “sulfonyl,” as used herein, represents an —S(O)₂— group.

[0939] The term “thioalkaryl,” as used herein, represents a chemical substituent of formula —SR, where R is an alkaryl group. In some embodiments, the alkaryl group can be further substituted with 1, 2, 3, or 4 substituent groups as described herein.

[0940] The term “thioalkheterocyclyl,” as used herein, represents a chemical substituent of formula —SR, where R is an alkheterocyclyl group. In some embodiments, the alkheterocyclyl group can be further substituted with 1, 2, 3, or 4 substituent groups as described herein.

[0941] The term “thioalkoxy,” as used herein, represents a chemical substituent of formula —SR, where R is an alkyl group, as defined herein. In some embodiments, the alkyl group can be further substituted with 1, 2, 3, or 4 substituent groups as described herein.

[0942] The term “thiol” represents an —SH group.

[0943] Compound: As used herein, the term “compound,” is meant to include all stereoisomers, geometric isomers, tautomers, and isotopes of the structures depicted.

[0944] The compounds described herein can be asymmetric (e.g., having one or more stereocenters). All stereoisomers, such as enantiomers and diastereomers, are intended unless otherwise indicated. Compounds of the present disclosure that contain asymmetrically substituted carbon atoms can be isolated in optically active or racemic forms. Methods on how to prepare optically active forms from optically active starting materials are known in the art, such as by resolution of racemic mixtures or by stereoselective synthesis. Many geometric isomers of olefins, C═N double bonds, and the like can also be present in the compounds described herein, and all such stable isomers are contemplated in the present disclosure. Cis and trans geometric isomers of the compounds of the present disclosure are described and may be isolated as a mixture of isomers or as separated isomeric forms.

[0945] Compounds of the present disclosure also include tautomeric forms. Tautomeric forms result from the swapping of a single bond with an adjacent double bond and the concomitant migration of a proton. Tautomeric forms include prototropic tautomers which are isomeric protonation states having the same empirical formula and total charge. Examples prototropic tautomers include ketone-enol pairs, amide-imidic acid pairs, lactam-lactim pairs, amide-imidic acid pairs, enamine-imine pairs, and annular forms where a proton can occupy two or more positions of a heterocyclic system, such as, 1H- and 3H-imidazole, 1H-, 2H- and 4H-1,2,4-triazole, 1H- and 2H-isoindole, and 1H- and 2H-pyrazole. Tautomeric forms can be in equilibrium or sterically locked into one form by appropriate substitution.

[0946] Compounds of the present disclosure also include all of the isotopes of the atoms occurring in the intermediate or final compounds. “Isotopes” refers to atoms having the same atomic number but different mass numbers resulting from a different number of neutrons in the nuclei. For example, isotopes of hydrogen include tritium and deuterium.

[0947] The compounds and salts of the present disclosure can be prepared in combination with solvent or water molecules to form solvates and hydrates by routine methods. CNTF: As used herein, the term “CNTF” refers to ciliary neurotrophic factor including any variants thereof.

[0948] Committed: As used herein, the term “committed” means, when referring to a cell, when the cell is far enough into the differentiation pathway where, under normal circumstances, it will continue to differentiate into a specific cell type or subset of cell type instead of into a different cell type or reverting to a lesser differentiated cell type.

[0949] Conserved: As used herein, the term “conserved” refers to nucleotides or amino acid residues of a polynucleotide sequence or polypeptide sequence, respectively, that are those that occur unaltered in the same position of two or more sequences being compared. Nucleotides or amino acids that are relatively conserved are those that are conserved amongst more related sequences than nucleotides or amino acids appearing elsewhere in the sequences.

[0950] In some embodiments, two or more sequences are said to be “completely conserved” if they are 100% identical to one another. In some embodiments, two or more sequences are said to be “highly conserved” if they are at least 70% identical, at least 80% identical, at least 90% identical, or at least 95% identical to one another. In some embodiments, two or more sequences are said to be “highly conserved” if they are about 70% identical, about 80% identical, about 90% identical, about 95%, about 98%, or about 99% identical to one another. In some embodiments, two or more sequences are said to be “conserved” if they are at least 30% identical, at least 40% identical, at least 50% identical, at least 60% identical, at least 70% identical, at least 80% identical, at least 90% identical, or at least 95% identical to one another. In some embodiments, two or more sequences are said to be “conserved” if they are about 30% identical, about 40% identical, about 50% identical, about 60% identical, about 70% identical, about 80% identical, about 90% identical, about 95% identical, about 98% identical, or about 99% identical to one another. Conservation of sequence may apply to the entire length of an oligonucleotide or polypeptide or may apply to a portion, region or feature thereof.

[0951] Controlled Release: As used herein, the term “controlled release” refers to a pharmaceutical composition or compound release profile that conforms to a particular pattern of release to effect a therapeutic outcome.

[0952] Cyclic or Cyclized: As used herein, the term “cyclic” refers to the presence of a continuous loop. Cyclic molecules need not be circular, only joined to form an unbroken chain of subunits. Cyclic molecules such as the engineered RNA or mRNA of the present invention may be single units or multimers or comprise one or more components of a complex or higher order structure.

[0953] Cytostatic: As used herein, “cytostatic” refers to inhibiting, reducing, suppressing the growth, division, or multiplication of a cell (e.g., a mammalian cell (e.g., a human cell)), bacterium, virus, fungus, protozoan, parasite, prion, or a combination thereof.

[0954] Cytotoxic: As used herein, “cytotoxic” refers to killing or causing injurious, toxic, or deadly effect on a cell (e.g., a mammalian cell (e.g., a human cell)), bacterium, virus, fungus, protozoan, parasite, prion, or a combination thereof.

[0955] Delivery: As used herein, “delivery” refers to the act or manner of delivering a compound, substance, entity, moiety, cargo or payload.

[0956] Delivery Agent: As used herein, “delivery agent” refers to any substance which facilitates, at least in part, the in vivo delivery of a cell phenotype altering polynucleotide, primary construct or mmRNA to targeted cells.

[0957] Destabilized: As used herein, the term “destable,” “destabilize,” or “destabilizing region” means a region or molecule that is less stable than a starting, wild-type or native form of the same region or molecule.

[0958] Detectable label: As used herein, “detectable label” refers to one or more markers, signals, or moieties which are attached, incorporated or associated with another entity that is readily detected by methods known in the art including radiography, fluorescence, chemiluminescence, enzymatic activity, absorbance and the like. Detectable labels include radioisotopes, fluorophores, chromophores, enzymes, dyes, metal ions, ligands such as biotin, avidin, streptavidin and haptens, quantum dots, and the like. Detectable labels may be located at any position in the peptides or proteins disclosed herein. They may be within the amino acids, the peptides, or proteins, or located at the N- or C-termini.

[0959] Developmental Potential: As used herein, “developmental potential” or “developmental potency” refers to the total of all developmental cell fates or cell types that can be achieved by a cell upon differentiation.

[0960] Developmental Potential Altering Factor: As used herein, “developmental potential altering factor” refers to a protein or RNA which can alter the developmental potential of a cell.

[0961] Digest: As used herein, the term “digest” means to break apart into smaller pieces or components. When referring to polypeptides or proteins, digestion results in the production of peptides.

[0962] Differentiated cell: As used herein, the term “differentiated cell” refers to any somatic cell that is not, in its native form, pluripotent. Differentiated cell also encompasses cells that are partially differentiated.

[0963] Differentiation: As used herein, the term “differentiation factor” refers to a developmental potential altering factor such as a protein, RNA or small molecule that can induce a cell to differentiate to a desired cell-type.

[0964] Differentiate: As used herein, “differentiate” refers to the process where an uncommitted or less committed cell acquires the features of a committed cell.

[0965] Distal: As used herein, the term “distal” means situated away from the center or away from a point or region of interest.

[0966] Dose splitting factor (DSF)-ratio of PUD of dose split treatment divided by PUD of total daily dose or single unit dose. The value is derived from comparison of dosing regimens groups.

[0967] EGF: As used herein, the term “EGF” refers to epidermal growth factor including any variants thereof.

[0968] Embryonic stem cell: As used herein, the term “embryonic stem cell” refers to naturally occurring pluripotent stem cells of the inner cell mass of the embryonic blastocyst.

[0969] Encapsulate: As used herein, the term “encapsulate” means to enclose, surround or encase.

[0970] Encoded protein cleavage signal: As used herein, “encoded protein cleavage signal” refers to the nucleotide sequence which encodes a protein cleavage signal.

[0971] Engineered: As used herein, embodiments of the invention are “engineered” when they are designed to have a feature or property, whether structural or chemical, that varies from a starting point, wild type or native molecule.

[0972] Exosome: As used herein, “exosome” is a vesicle secreted by mammalian cells or a complex involved in RNA degradation.

[0973] Expression: As used herein, “expression” of a nucleic acid sequence refers to one or more of the following events: (1) production of an RNA template from a DNA sequence (e.g., by transcription); (2) processing of an RNA transcript (e.g., by splicing, editing, 5′ cap formation, and/or 3′ end processing); (3) translation of an RNA into a polypeptide or protein; and (4) post-translational modification of a polypeptide or protein.

[0974] FGF: As used herein, the term “FGF” refers to the fibroblast growth factor protein family including any variants thereof.

[0975] FGF-8: As used herein, the term “FGF-8” refers to fibroblast growth factor-8 protein including any variants thereof.

[0976] Feature: As used herein, a “feature” refers to a characteristic, a property, or a distinctive element.

[0977] Formulation: As used herein, a “formulation” includes at least a cell phenotype altering polynucleotide, primary construct or mmRNA and a delivery agent.

[0978] Fragment: A “fragment,” as used herein, refers to a portion. For example, fragments of proteins may comprise polypeptides obtained by digesting full-length protein isolated from cultured cells.

[0979] Functional: As used herein, a “functional” biological molecule is a biological molecule in a form in which it exhibits a property and/or activity by which it is characterized.

[0980] HNF4-alpha: As used herein, the term “HNF4-alpha” refers to hepatocyte nuclear factor 4, alpha protein including any variants thereof.

[0981] Homology: As used herein, the term “homology” refers to the overall relatedness between polymeric molecules, e.g. between nucleic acid molecules (e.g. DNA molecules and/or RNA molecules) and/or between polypeptide molecules. In some embodiments, polymeric molecules are considered to be “homologous” to one another if their sequences are at least 25%, 30%, 35%, 40%, 45%, 50%, 55%, 60%, 65%, 70%, 75%, 80%, 85%, 90%, 95%, or 99% identical or similar. The term “homologous” necessarily refers to a comparison between at least two sequences (polynucleotide or polypeptide sequences). In accordance with the invention, two polynucleotide sequences are considered to be homologous if the polypeptides they encode are at least about 50%, 60%, 70%, 80%, 90%, 95%, or even 99% for at least one stretch of at least about 20 amino acids. In some embodiments, homologous polynucleotide sequences are characterized by the ability to encode a stretch of at least 4-5 uniquely specified amino acids. For polynucleotide sequences less than 60 nucleotides in length, homology is determined by the ability to encode a stretch of at least 4-5 uniquely specified amino acids. In accordance with the invention, two protein sequences are considered to be homologous if the proteins are at least about 50%, 60%, 70%, 80%, or 90% identical for at least one stretch of at least about 20 amino acids.

[0982] Identity: As used herein, the term “identity” refers to the overall relatedness between polymeric molecules, e.g., between oligonucleotide molecules (e.g. DNA molecules and/or RNA molecules) and/or between polypeptide molecules. Calculation of the percent identity of two polynucleotide sequences, for example, can be performed by aligning the two sequences for optimal comparison purposes (e.g., gaps can be introduced in one or both of a first and a second nucleic acid sequences for optimal alignment and non-identical sequences can be disregarded for comparison purposes). In certain embodiments, the length of a sequence aligned for comparison purposes is at least 30%, at least 40%, at least 50%, at least 60%, at least 70%, at least 80%, at least 90%, at least 95%, or 100% of the length of the reference sequence. The nucleotides at corresponding nucleotide positions are then compared. When a position in the first sequence is occupied by the same nucleotide as the corresponding position in the second sequence, then the molecules are identical at that position. The percent identity between the two sequences is a function of the number of identical positions shared by the sequences, taking into account the number of gaps, and the length of each gap, which needs to be introduced for optimal alignment of the two sequences. The comparison of sequences and determination of percent identity between two sequences can be accomplished using a mathematical algorithm. For example, the percent identity between two nucleotide sequences can be determined using methods such as those described in Computational Molecular Biology, Lesk, A. M., ed., Oxford University Press, New York, 1988; Biocomputing: Informatics and Genome Projects, Smith, D. W., ed., Academic Press, New York, 1993; Sequence Analysis in Molecular Biology, von Heinje, G., Academic Press, 1987; Computer Analysis of Sequence Data, Part I, Griffin, A. M., and Griffin, H. G., eds., Humana Press, New Jersey, 1994; and Sequence Analysis Primer, Gribskov, M. and Devereux, J., eds., M Stockton Press, New York, 1991; each of which is incorporated herein by reference. For example, the percent identity between two nucleotide sequences can be determined using the algorithm of Meyers and Miller (CABIOS, 1989, 4:11-17), which has been incorporated into the ALIGN program (version 2.0) using a PAM120 weight residue table, a gap length penalty of 12 and a gap penalty of 4. The percent identity between two nucleotide sequences can, alternatively, be determined using the GAP program in the GCG software package using an NWSgapdna.CMP matrix. Methods commonly employed to determine percent identity between sequences include, but are not limited to those disclosed in Carillo, H., and Lipman, D., SIAM J Applied Math., 48:1073 (1988); incorporated herein by reference. Techniques for determining identity are codified in publicly available computer programs. Exemplary computer software to determine homology between two sequences include, but are not limited to, GCG program package, Devereux, J., et al., Nucleic Acids Research, 12(1), 387 (1984)), BLASTP, BLASTN, and FASTA Altschul, S. F. et al., J. Molec. Biol., 215, 403 (1990)).

[0983] Inhibit expression of a gene: As used herein, the phrase “inhibit expression of a gene” means to cause a reduction in the amount of an expression product of the gene. The expression product can be an RNA transcribed from the gene (e.g., an mRNA) or a polypeptide translated from an mRNA transcribed from the gene. Typically a reduction in the level of an mRNA results in a reduction in the level of a polypeptide translated therefrom. The level of expression may be determined using standard techniques for measuring mRNA or protein.

[0984] In vitro: As used herein, the term “in vitro” refers to events that occur in an artificial environment, e.g., in a test tube or reaction vessel, in cell culture, in a Petri dish, etc., rather than within an organism (e.g., animal, plant, or microbe).

[0985] In vivo: As used herein, the term “in vivo” refers to events that occur within an organism (e.g., animal, plant, or microbe or cell or tissue thereof).

[0986] Isolated: As used herein, the term “isolated” refers to a substance or entity that has been separated from at least some of the components with which it was associated (whether in nature or in an experimental setting). Isolated substances may have varying levels of purity in reference to the substances from which they have been associated. Isolated substances and/or entities may be separated from at least about 10%, about 20%, about 30%, about 40%, about 50%, about 60%, about 70%, about 80%, about 90%, or more of the other components with which they were initially associated. In some embodiments, isolated agents are more than about 80%, about 85%, about 90%, about 91%, about 92%, about 93%, about 94%, about 95%, about 96%, about 97%, about 98%, about 99%, or more than about 99% pure. As used herein, a substance is “pure” if it is substantially free of other components. Substantially isolated: By “substantially isolated” is meant that the compound is substantially separated from the environment in which it was formed or detected. Partial separation can include, for example, a composition enriched in the compound of the present disclosure. Substantial separation can include compositions containing at least about 50%, at least about 60%, at least about 70%, at least about 80%, at least about 90%, at least about 95%, at least about 97%, or at least about 99% by weight of the compound of the present disclosure, or salt thereof. Methods for isolating compounds and their salts are routine in the art.

[0987] KLF: As used herein, the term “KLF” refers to the kruppel-like factor protein family including any variants thereof.

[0988] KLFJ: As used herein, the term “KLF1” refers to the protein kruppel-like factor 1 including any variants thereof.

[0989] KLF2: As used herein, the term “KLF2” refers to the protein kruppel-like factor 2 including any variants thereof.

[0990] KLF4: As used herein, the term “KLF4” refers to the protein kruppel-like factor 4 including any variants thereof.

[0991] LIN28: As used herein, the term “LIN28” refers to the lin-28 homolog protein including any variants thereof.

[0992] Linker: As used herein, a linker refers to a group of atoms, e.g., 10-1,000 atoms, and can be comprised of the atoms or groups such as, but not limited to, carbon, amino, alkylamino, oxygen, sulfur, sulfoxide, sulfonyl, carbonyl, and imine. The linker can be attached to a modified nucleoside or nucleotide on the nucleobase or sugar moiety at a first end, and to a payload, e.g., a detectable or therapeutic agent, at a second end. The linker may be of sufficient length as to not interfere with incorporation into a nucleic acid sequence. The linker can be used for any useful purpose, such as to form mmRNA multimers (e.g., through linkage of two or more cell phenotype altering polynucleotides, primary constructs, or mmRNA molecules) or mmRNA conjugates, as well as to administer a payload, as described herein. Examples of chemical groups that can be incorporated into the linker include, but are not limited to, alkyl, alkenyl, alkynyl, amido, amino, ether, thioether, ester, alkylene, heteroalkylene, aryl, or heterocyclyl, each of which can be optionally substituted, as described herein. Examples of linkers include, but are not limited to, unsaturated alkanes, polyethylene glycols (e.g., ethylene or propylene glycol monomeric units, e.g., diethylene glycol, dipropylene glycol, triethylene glycol, tripropylene glycol, tetraethylene glycol, or tetraethylene glycol), and dextran polymers, Other examples include, but are not limited to, cleavable moieties within the linker, such as, for example, a disulfide bond (—S—S—) or an azo bond (—N═N—), which can be cleaved using a reducing agent or photolysis. Non-limiting examples of a selectively cleavable bond include an amido bond can be cleaved for example by the use of tris(2-carboxyethyl)phosphine (TCEP), or other reducing agents, and/or photolysis, as well as an ester bond can be cleaved for example by acidic or basic hydrolysis.

[0993] MicroRNA (miRNA) binding site: As used herein, a microRNA (miRNA) binding site represents a nucleotide location or region of a nucleic acid transcript to which at least the “seed” region of a miRNA binds.

[0994] Modified: As used herein “modified” refers to a changed state or structure of a molecule of the invention. Molecules may be modified in many ways including chemically, structurally, and functionally. In one embodiment, the mRNA molecules of the present invention are modified by the introduction of non-natural nucleosides and/or nucleotides, e.g., as it relates to the natural ribonucleotides A, U, G, and C. Noncanonical nucleotides such as the cap structures are not considered “modified” although they differ from the chemical structure of the A, C, G, U ribonucleotides.

[0995] Mucus: As used herein, “mucus” refers to the natural substance that is viscous and comprises mucin glycoproteins.

[0996] Multipotent: As used herein, “multipotent” or “partially differentiated cell” when referring to a cell refers to a cell that has a developmental potential to differentiate into cells of one or more germ layers, but not all three germ layers.

[0997] MYC: As used herein, the term “MYC” refers to the v-myc myelocytomatosis viral oncogene protein family including any variants thereof.

[0998] c-MYC: As used herein, the term “c-MYC” refers to the protein v-myc myelocytomatosis viral oncogene homolog (avian) including any variants thereof.

[0999] n-MYC: As used herein, the term “n-MYC” refers to the protein v-myc myelocytomatosis viral related oncogene, neuroblastoma derived (avian) including any variants thereof.

[1000] MYODJ: As used herein, the term “MYOD1” refers to the myogenic differentiation 1 protein including any variants thereof.

[1001] MYT1L: As used herein, the term “MYT1L” refers to the myelin transcription factor 1-like protein including any variants thereof.

[1002] NANOG: As used herein, the term “NANOG” refers to the protein Nanog homeobox including any variants thereof.

[1003] Naturally occurring: As used herein, “naturally occurring” means existing in nature without artificial aid.

[1004] NGF: As used herein, the term “NGF” refers to nerve growth factor protein family including any variants thereof.

[1005] Non-human vertebrate: As used herein, a “non human vertebrate” includes all vertebrates except Homo sapiens, including wild and domesticated species. Examples of non-human vertebrates include, but are not limited to, mammals, such as alpaca, banteng, bison, camel, cat, cattle, deer, dog, donkey, gayal, goat, guinea pig, horse, llama, mule, pig, rabbit, reindeer, sheep water buffalo, and yak.

[1006] NR5A2: As used herein, the term “NR5A2” refers to the protein nuclear receptor subfamily 5, group A, member 1 including any variants thereof.

[1007] NTF: As used herein, the term “NTF” refers to the neurotrophin protein family including any variants thereof.

[1008] NTF3: As used herein, the term “NTF3” refers to neurotrophin 3 including any variants thereof.

[1009] NTF4: As used herein, the term “NTF4” refers to neurotrophin 4 including any variants thereof.

[1010] OCT: As used herein, the term “OCT” refers to the octamer-binding protein family including any variants thereof.

[1011] OCT4: As used herein, the term “OCT4” refers to the ocatmer-binding protein 4, including any variants thereof. OCT4 is also known in the art as POU class 5 homeobox 1 (POU5F1) and octamer-binding protein 3 (OCT3).

[1012] Off-target: As used herein, “off target” refers to any unintended effect on any one or more target, gene, or cellular transcript.

[1013] Oligopotent: As used herein, “oligopotent” when referring to a cell means to give rise to a more restricted subset of cell lineages than multipotent stem cells.

[1014] Open reading frame: As used herein, “open reading frame” or “ORF” refers to a sequence which does not contain a stop codon in a given reading frame.

[1015] Operably linked: As used herein, the phrase “operably linked” refers to a functional connection between two or more molecules, constructs, transcripts, entities, moieties or the like.

[1016] Optionally substituted: Herein a phrase of the form “optionally substituted X” (e.g., optionally substituted alkyl) is intended to be equivalent to “X, wherein X is optionally substituted” (e.g., “alkyl, wherein said alkyl is optionally substituted”). It is not intended to mean that the feature “X” (e.g. alkyl) per se is optional.

[1017] Peptide: As used herein, “peptide” is less than or equal to 50 amino acids long, e.g., about 5, 10, 15, 20, 25, 30, 35, 40, 45, or 50 amino acids long.

[1018] Paratope: As used herein, a “paratope” refers to the antigen-binding site of an antibody.

[1019] Patient: As used herein, “patient” refers to a subject who may seek or be in need of treatment, requires treatment, is receiving treatment, will receive treatment, or a subject who is under care by a trained professional for a particular disease or condition.

[1020] Pharmaceutically acceptable: The phrase “pharmaceutically acceptable” is employed herein to refer to those compounds, materials, compositions, and/or dosage forms which are, within the scope of sound medical judgment, suitable for use in contact with the tissues of human beings and animals without excessive toxicity, irritation, allergic response, or other problem or complication, commensurate with a reasonable benefit/risk ratio.

[1021] Pharmaceutically acceptable excipients: The phrase “pharmaceutically acceptable excipient,” as used herein, refers any ingredient other than the compounds described herein (for example, a vehicle capable of suspending or dissolving the active compound) and having the properties of being substantially nontoxic and non-inflammatory in a patient. Excipients may include, for example: antiadherents, antioxidants, binders, coatings, compression aids, disintegrants, dyes (colors), emollients, emulsifiers, fillers (diluents), film formers or coatings, flavors, fragrances, glidants (flow enhancers), lubricants, preservatives, printing inks, sorbents, suspensing or dispersing agents, sweeteners, and waters of hydration. Exemplary excipients include, but are not limited to: butylated hydroxytoluene (BHT), calcium carbonate, calcium phosphate (dibasic), calcium stearate, croscarmellose, crosslinked polyvinyl pyrrolidone, citric acid, crospovidone, cysteine, ethylcellulose, gelatin, hydroxypropyl cellulose, hydroxypropyl methylcellulose, lactose, magnesium stearate, maltitol, mannitol, methionine, methylcellulose, methyl paraben, microcrystalline cellulose, polyethylene glycol, polyvinyl pyrrolidone, povidone, pregelatinized starch, propyl paraben, retinyl palmitate, shellac, silicon dioxide, sodium carboxymethyl cellulose, sodium citrate, sodium starch glycolate, sorbitol, starch (corn), stearic acid, sucrose, talc, titanium dioxide, vitamin A, vitamin E, vitamin C, and xylitol.

[1022] Pharmaceutically acceptable salts: The present disclosure also includes pharmaceutically acceptable salts of the compounds described herein. As used herein, “pharmaceutically acceptable salts” refers to derivatives of the disclosed compounds wherein the parent compound is modified by converting an existing acid or base moiety to its salt form (e.g., by reacting the free base group with a suitable organic acid). Examples of pharmaceutically acceptable salts include, but are not limited to, mineral or organic acid salts of basic residues such as amines; alkali or organic salts of acidic residues such as carboxylic acids; and the like. Representative acid addition salts include acetate, adipate, alginate, ascorbate, aspartate, benzenesulfonate, benzoate, bisulfate, borate, butyrate, camphorate, camphorsulfonate, citrate, cyclopentanepropionate, digluconate, dodecylsulfate, ethanesulfonate, fumarate, glucoheptonate, glycerophosphate, hemisulfate, heptonate, hexanoate, hydrobromide, hydrochloride, hydroiodide, 2-hydroxy-ethanesulfonate, lactobionate, lactate, laurate, lauryl sulfate, malate, maleate, malonate, methanesulfonate, 2-naphthalenesulfonate, nicotinate, nitrate, oleate, oxalate, palmitate, pamoate, pectinate, persulfate, 3-phenylpropionate, phosphate, picrate, pivalate, propionate, stearate, succinate, sulfate, tartrate, thiocyanate, toluenesulfonate, undecanoate, valerate salts, and the like. Representative alkali or alkaline earth metal salts include sodium, lithium, potassium, calcium, magnesium, and the like, as well as nontoxic ammonium, quaternary ammonium, and amine cations, including, but not limited to ammonium, tetramethylammonium, tetraethylammonium, methylamine, dimethylamine, trimethylamine, triethylamine, ethylamine, and the like. The pharmaceutically acceptable salts of the present disclosure include the conventional non-toxic salts of the parent compound formed, for example, from non-toxic inorganic or organic acids. The pharmaceutically acceptable salts of the present disclosure can be synthesized from the parent compound which contains a basic or acidic moiety by conventional chemical methods. Generally, such salts can be prepared by reacting the free acid or base forms of these compounds with a stoichiometric amount of the appropriate base or acid in water or in an organic solvent, or in a mixture of the two; generally, nonaqueous media like ether, ethyl acetate, ethanol, isopropanol, or acetonitrile are preferred. Lists of suitable salts are found in Remington's Pharmaceutical Sciences, 17^{th} ed., Mack Publishing Company, Easton, Pa., 1985, p. 1418, Pharmaceutical Salts: Properties, Selection, and Use, P. H. Stahl and C. G. Wermuth (eds.), Wiley-VCH, 2008, and Berge et al., Journal of Pharmaceutical Science, 66, 1-19 (1977), each of which is incorporated herein by reference in its entirety.

[1023] Pharmacokinetic: As used herein, “pharmacokinetic” refers to any one or more properties of a molecule or compound as it relates to the determination of the fate of substances administered to a living organism. Pharmacokinetics is divided into several areas including the extent and rate of absorption, distribution, metabolism and excretion. This is commonly referred to as ADME where: (A) Absorption is the process of a substance entering the blood circulation; (D) Distribution is the dispersion or dissemination of substances throughout the fluids and tissues of the body; (M) Metabolism (or Biotransformation) is the irreversible transformation of parent compounds into daughter metabolites; and (E) Excretion (or Elimination) refers to the elimination of the substances from the body. In rare cases, some drugs irreversibly accumulate in body tissue.

[1024] Pharmaceutically acceptable solvate: The term “pharmaceutically acceptable solvate,” as used herein, means a compound of the invention wherein molecules of a suitable solvent are incorporated in the crystal lattice. A suitable solvent is physiologically tolerable at the dosage administered. For example, solvates may be prepared by crystallization, recrystallization, or precipitation from a solution that includes organic solvents, water, or a mixture thereof. Examples of suitable solvents are ethanol, water (for example, mono-, di-, and tri-hydrates), N-methylpyrrolidinone (NMP), dimethyl sulfoxide (DMSO), N,N′-dimethylformamide (DMF), N,N′-dimethylacetamide (DMAC), 1,3-dimethyl-2-imidazolidinone (DMEU), 1,3-dimethyl-3,4,5,6-tetrahydro-2-(1H)-pyrimidinone (DMPU), acetonitrile (ACN), propylene glycol, ethyl acetate, benzyl alcohol, 2-pyrrolidone, benzyl benzoate, and the like. When water is the solvent, the solvate is referred to as a “hydrate.”

[1025] Physicochemical: As used herein, “physicochemical” means of or relating to a physical and/or chemical property.

[1026] Pluripotent: As used herein, “pluripotent” refers to a cell with the developmental potential, under different conditions, to differentiate to cell types characteristic of all three germ layers.

[1027] Pluripotency: As used herein, “pluripotency” or “pluripotent state” refers to the developmental potential of a cell where the cell has the ability to differentitate into all three embryonic germ layers (endoderm, mesoderm and ectoderm).

[1028] PRDM16: As used herein, the term “PRDM16” refers to PR domain containing 16 protein including any variants thereof.

[1029] Preventing: As used herein, the term “preventing” refers to partially or completely delaying onset of an infection, disease, disorder and/or condition; partially or completely delaying onset of one or more symptoms, features, or clinical manifestations of a particular infection, disease, disorder, and/or condition; partially or completely delaying onset of one or more symptoms, features, or manifestations of a particular infection, disease, disorder, and/or condition; partially or completely delaying progression from an infection, a particular disease, disorder and/or condition; and/or decreasing the risk of developing pathology associated with the infection, the disease, disorder, and/or condition.

[1030] Prodrug: The present disclosure also includes prodrugs of the compounds described herein. As used herein, “prodrugs” refer to any substance, molecule or entity which is in a form predicate for that substance, molecule or entity to act as a therapeutic upon chemical or physical alteration. Prodrugs may by covalently bonded or sequestered in some way and which release or are converted into the active drug moiety prior to, upon or after administered to a mammalian subject. Prodrugs can be prepared by modifying functional groups present in the compounds in such a way that the modifications are cleaved, either in routine manipulation or in vivo, to the parent compounds. Prodrugs include compounds wherein hydroxyl, amino, sulfhydryl, or carboxyl groups are bonded to any group that, when administered to a mammalian subject, cleaves to form a free hydroxyl, amino, sulfhydryl, or carboxyl group respectively. Preparation and use of prodrugs is discussed in T. Higuchi and V. Stella, “Pro-drugs as Novel Delivery Systems,” Vol. 14 of the A.C.S. Symposium Series, and in Bioreversible Carriers in Drug Design, ed. Edward B. Roche, American Pharmaceutical Association and Pergamon Press, 1987, both of which are hereby incorporated by reference in their entirety.

[1031] Proliferate: As used herein, the term “proliferate” means to grow, expand or increase or cause to grow, expand or increase rapidly. “Proliferative” means having the ability to proliferate. “Anti-proliferative” means having properties counter to or inapposite to proliferative properties.

[1032] Progenitor cell: As used herein, the term “progenitor cell” refers to cells that have greater developmental potential relative to a cell which it can give rise to by differentiation.

[1033] Protein cleavage site: As used herein, “protein cleavage site” refers to a site where controlled cleavage of the amino acid chain can be accomplished by chemical, enzymatic or photochemical means.

[1034] Protein cleavage signal: As used herein “protein cleavage signal” refers to at least one amino acid that flags or marks a polypeptide for cleavage.

[1035] Protein of interest: As used herein, the terms “proteins of interest” or “desired proteins” include those provided herein and fragments, mutants, variants, and alterations thereof.

[1036] Proximal: As used herein, the term “proximal” means situated nearer to the center or to a point or region of interest.

[1037] PU.1: As used herein, the term “PU.1” refers to spleen focus forming virus (SFFV) proviral integration oncogene spi1 protein including any variants thereof.

[1038] Purified: As used herein, “purify,” “purified,” “purification” means to make substantially pure or clear from unwanted components, material defilement, admixture or imperfection.

[1039] REM2: As used herein, the term “REM2” refers to the protein RAS (RAD and GEM)-like GTP binding 2 protein including any variants thereof.

[1040] Repeated transfection: As used herein, the term “repeated transfection” refers to transfection of the same cell culture with a cell phenotype altering polynucleotide, primary construct or mmRNA a plurality of times. The cell culture can be transfected at least twice, at least 3 times, at least 4 times, at least 5 times, at least 6 times, at least 7 times, at least 8 times, at least 9 times, at least 10 times, at least 11 times, at least 12 times, at least 13 times, at least 14 times, at least 15 times, at least 16 times, at least 17 times at least 18 times, at least 19 times, at least 20 times, at least 25 times, at least 30 times, at least 35 times, at least 40 times, at least 45 times, at least 50 times or more.

[1041] Reprogramming: As used herein, “reprogramming” refers to a process that reverses the developmental potential of a cell or population of cells.

[1042] Reprogramming factor: As used herein, the term “reprogramming factor” refers to a developmental potential altering factor such as a protein, RNA or small molecule, the expression of which contributes to the reprogramming of a cell to a less differentiated or undifferentiated state.

[1043] Sample: As used herein, the term “sample” or “biological sample” refers to a subset of its tissues, cells or component parts (e.g. body fluids, including but not limited to blood, mucus, lymphatic fluid, synovial fluid, cerebrospinal fluid, saliva, amniotic fluid, amniotic cord blood, urine, vaginal fluid and semen). A sample further may include a homogenate, lysate or extract prepared from a whole organism or a subset of its tissues, cells or component parts, or a fraction or portion thereof, including but not limited to, for example, plasma, serum, spinal fluid, lymph fluid, the external sections of the skin, respiratory, intestinal, and genitourinary tracts, tears, saliva, milk, blood cells, tumors, organs. A sample further refers to a medium, such as a nutrient broth or gel, which may contain cellular components, such as proteins or nucleic acid molecule.

[1044] Signal Sequences: As used herein, the phrase “signal sequences” refers to a sequence which can direct the transport or localization of a protein.

[1045] Single unit dose: As used herein, a “single unit dose” is a dose of any therapeutic administered in one dose/at one time/single route/single point of contact, i.e., single administration event.

[1046] Similarity: As used herein, the term “similarity” refers to the overall relatedness between polymeric molecules, e.g. between polynucleotide molecules (e.g. DNA molecules and/or RNA molecules) and/or between polypeptide molecules.

[1047] Calculation of percent similarity of polymeric molecules to one another can be performed in the same manner as a calculation of percent identity, except that calculation of percent similarity takes into account conservative substitutions as is understood in the art.

[1048] Sonic hedgehog: As used herein, the phrase “sonic hedgehog” refers to the sonic hedgehog protein including any variants thereof.

[1049] Somatic cell: As used herein, “somatic cells” refers to any cell other than a germ cell, a cell present in or obtained from a pre-implantation embryo, or a cell resulting from proliferation of such a cell in vitro.

[1050] Somatic stem cell: As used herein, a “somatic stem cell” refers to any pluripotent or multipotent stem cell derived from non-embryonic tissue including fetal, juvenile and adult tissue.

[1051] Somatic pluripotent cell: As used herein, a “somatic pluripotent cell” refers to a somatic cell that has had its developmental potential altered to that of a pluripotent state.

[1052] SOX: As used herein, the term “SOX” refers to the SRY (sex determining region Y)-box protein family including any variants thereof.

[1053] SOX1: As used herein, the term “SOX1” refers to the protein SRY (sex determining region Y)-box 1 including any variants thereof.

[1054] SOX2: As used herein, the term “SOX2” refers to the protein SRY (sex determining region Y)-box 2 including any variants thereof.

[1055] SOX3: As used herein, the term “SOX3” refers to the protein SRY (sex determining region Y)-box 3 including any variants thereof.

[1056] SOX15: As used herein, the term “SOX15” refers to the protein SRY (sex determining region Y)-box 15 including any variants thereof.

[1057] SOX18: As used herein, the term “SOX18” refers to the protein SRY (sex determining region Y)-box 18 including any variants thereof.

[1058] Split dose: As used herein, a “split dose” is the division of single unit dose or total daily dose into two or more doses.

[1059] Stable: As used herein “stable” refers to a compound that is sufficiently robust to survive isolation to a useful degree of purity from a reaction mixture, and preferably capable of formulation into an efficacious therapeutic agent.

[1060] Stabilized: As used herein, the term “stabilize”, “stabilized,” “stabilized region” means to make or become stable.

[1061] Stem cell: As used herein, the term “stem cell” refers to a cell in an undifferentiated or partially differentiated state that has the property of self-renewal and ahs the developmental potential to differentiate into multiple cell types, without a specific developmental potential. A stem cell may be able capable of proliferation and giving rise to more such stem cells while maintaining its developmental potential.

[1062] Subject: As used herein, the term “subject” or “patient” refers to any organism to which a composition in accordance with the invention may be administered, e.g., for experimental, diagnostic, prophylactic, and/or therapeutic purposes. Typical subjects include animals (e.g., mammals such as mice, rats, rabbits, non-human primates, and humans) and/or plants.

[1063] Substantially: As used herein, the term “substantially” refers to the qualitative condition of exhibiting total or near-total extent or degree of a characteristic or property of interest. One of ordinary skill in the biological arts will understand that biological and chemical phenomena rarely, if ever, go to completion and/or proceed to completeness or achieve or avoid an absolute result. The term “substantially” is therefore used herein to capture the potential lack of completeness inherent in many biological and chemical phenomena.

[1064] Substantially equal: As used herein as it relates to time differences between doses, the term means plus/minus 2%.

[1065] Substantially simultaneously: As used herein and as it relates to plurality of doses, the term means within 2 seconds.

[1066] Suffering from: An individual who is “suffering from” a disease, disorder, and/or condition has been diagnosed with or displays one or more symptoms of a disease, disorder, and/or condition.

[1067] Susceptible to: An individual who is “susceptible to” a disease, disorder, and/or condition has not been diagnosed with and/or may not exhibit symptoms of the disease, disorder, and/or condition but harbors a propensity to develop a disease or its symptoms. In some embodiments, an individual who is susceptible to a disease, disorder, and/or condition (for example, cancer) may be characterized by one or more of the following: (1) a genetic mutation associated with development of the disease, disorder, and/or condition; (2) a genetic polymorphism associated with development of the disease, disorder, and/or condition; (3) increased and/or decreased expression and/or activity of a protein and/or nucleic acid associated with the disease, disorder, and/or condition; (4) habits and/or lifestyles associated with development of the disease, disorder, and/or condition; (5) a family history of the disease, disorder, and/or condition; and (6) exposure to and/or infection with a microbe associated with development of the disease, disorder, and/or condition. In some embodiments, an individual who is susceptible to a disease, disorder, and/or condition will develop the disease, disorder, and/or condition. In some embodiments, an individual who is susceptible to a disease, disorder, and/or condition will not develop the disease, disorder, and/or condition.

[1068] Sustained release: As used herein, the term “sustained release” refers to a pharmaceutical composition or compound release profile that conforms to a release rate over a specific period of time.

[1069] Synthetic: The term “synthetic” means produced, prepared, and/or manufactured by the hand of man. Synthesis of polynucleotides or polypeptides or other molecules of the present invention may be chemical or enzymatic.

[1070] Targeted Cells: As used herein, “targeted cells” refers to any one or more cells of interest. The cells may be found in vitro, in vivo, in situ or in the tissue or organ of an organism. The organism may be an animal, preferably a mammal, more preferably a human and most preferably a patient.

[1071] TGF: As used herein, the term “TGF” refers to the transforming growth factor protein family including any variants thereof.

[1072] TGF-alpha: As used herein, the term “TGF-alpha” refers to transforming growth factor, alpha protein including any variants thereof.

[1073] TGF-beta: As used herein, the term “TGF-beta” refers to transforming growth factor, beta protein including any variants thereof.

[1074] TERT: As used herein, the term “TERT” refers to the protein telomerase reverse transcriptase protein including any variants thereof.

[1075] Therapeutic Agent: The term “therapeutic agent” refers to any agent that, when administered to a subject, has a therapeutic, diagnostic, and/or prophylactic effect and/or elicits a desired biological and/or pharmacological effect.

[1076] Therapeutically effective amount: As used herein, the term “therapeutically effective amount” means an amount of an agent to be delivered (e.g., nucleic acid, drug, therapeutic agent, diagnostic agent, prophylactic agent, etc.) that is sufficient, when administered to a subject suffering from or susceptible to an infection, disease, disorder, and/or condition, to treat, improve symptoms of, diagnose, prevent, and/or delay the onset of the infection, disease, disorder, and/or condition.

[1077] Therapeutically effective outcome: As used herein, the term “therapeutically effective outcome” means an outcome that is sufficient in a subject suffering from or susceptible to an infection, disease, disorder, and/or condition, to treat, improve symptoms of, diagnose, prevent, and/or delay the onset of the infection, disease, disorder, and/or condition.

[1078] Total daily dose: As used herein, a “total daily dose” is an amount given or prescribed in 24 hr period. It may be administered as a single unit dose.

[1079] Totipotency: As used herein, “totipotency” refers to a cell with a developmental potential to make all of the cells found in the adult body as well as the extra-embryonic tissues, including the placenta.

[1080] Transcription factor: As used herein, the term “transcription factor” refers to a DNA-binding protein that regulates transcription of DNA into RNA, for example, by activation or repression of transcription. Some transcription factors effect regulation of transcription alone, while others act in concert with other proteins. Some transcription factor can both activate and repress transcription under certain conditions. In general, transcription factors bind a specific target sequence or sequences highly similar to a specific consensus sequence in a regulatory region of a target gene. Transcription factors may regulate transcription of a target gene alone or in a complex with other molecules.

[1081] Transcription: As used herein, the term “transcription” refers to methods to introduce exogenous nucleic acids into a cell. Methods of transfection include, but are not limited to, chemical methods, plysical treatments and cationic lipids or mixtures.

[1082] Transdifferentiation: As used herein, “transdifferentiation” refers to the capacity of differentiated cells of one type to lose identifying characteristics and to change their phenotype to that of other fully differentiated cells.

[1083] Treating: As used herein, the term “treating” refers to partially or completely alleviating, ameliorating, improving, relieving, delaying onset of, inhibiting progression of, reducing severity of, and/or reducing incidence of one or more symptoms or features of a particular infection, disease, disorder, and/or condition. For example, “treating” cancer may refer to inhibiting survival, growth, and/or spread of a tumor. Treatment may be administered to a subject who does not exhibit signs of a disease, disorder, and/or condition and/or to a subject who exhibits only early signs of a disease, disorder, and/or condition for the purpose of decreasing the risk of developing pathology associated with the disease, disorder, and/or condition.

[1084] Unmodified: As used herein, “unmodified” refers to any substance, compound or molecule prior to being changed in any way. Unmodified may, but does not always, refer to the wild type or native form of a biomolecule. Molecules may undergo a series of modifications whereby each modified molecule may serve as the “unmodified” starting molecule for a subsequent modification.

[1085] Unipotent: As used herein, “unipotent” when referring to a cell means to give rise to a single cell lineage.

### Equivalents and Scope

[1086] Those skilled in the art will recognize, or be able to ascertain using no more than routine experimentation, many equivalents to the specific embodiments in accordance with the invention described herein. The scope of the present invention is not intended to be limited to the above Description, but rather is as set forth in the appended claims.

[1087] In the claims, articles such as “a,” “an,” and “the” may mean one or more than one unless indicated to the contrary or otherwise evident from the context. Claims or descriptions that include “or” between one or more members of a group are considered satisfied if one, more than one, or all of the group members are present in, employed in, or otherwise relevant to a given product or process unless indicated to the contrary or otherwise evident from the context. The invention includes embodiments in which exactly one member of the group is present in, employed in, or otherwise relevant to a given product or process. The invention includes embodiments in which more than one, or all of the group members are present in, employed in, or otherwise relevant to a given product or process.

[1088] It is also noted that the term “comprising” is intended to be open and permits but does not require the inclusion of additional elements or steps. When the term “comprising” is used herein, the term “consisting of” is thus also encompassed and disclosed.

[1089] Where ranges are given, endpoints are included. Furthermore, it is to be understood that unless otherwise indicated or otherwise evident from the context and understanding of one of ordinary skill in the art, values that are expressed as ranges can assume any specific value or subrange within the stated ranges in different embodiments of the invention, to the tenth of the unit of the lower limit of the range, unless the context clearly dictates otherwise.

[1090] In addition, it is to be understood that any particular embodiment of the present invention that falls within the prior art may be explicitly excluded from any one or more of the claims. Since such embodiments are deemed to be known to one of ordinary skill in the art, they may be excluded even if the exclusion is not set forth explicitly herein. Any particular embodiment of the compositions of the invention (e.g., any nucleic acid or protein encoded thereby; any method of production; any method of use; etc.) can be excluded from any one or more claims, for any reason, whether or not related to the existence of prior art.

[1091] All cited sources, for example, references, publications, databases, database entries, and art cited herein, are incorporated into this application by reference, even if not expressly stated in the citation. In case of conflicting statements of a cited source and the instant application, the statement in the instant application shall control.

[1092] Section and table headings are not intended to be limiting.

### EXAMPLES

### Example 1

### Modified mRNA Production

[1093] Modified mRNAs (mmRNA) according to the invention may be made using standard laboratory methods and materials. The open reading frame (ORF) of the gene of interest may be flanked by a 5′ untranslated region (UTR) which may contain a strong Kozak translational initiation signal and/or an alpha-globin 3′ UTR which may include an oligo(dT) sequence for templated addition of a poly-A tail. The modified mRNAs may be modified to reduce the cellular innate immune response. The modifications to reduce the cellular response may include pseudouridine (ψ) and 5-methyl-cytidine (5meC, 5mc or m⁵C). (See, Kariko K et al. Immunity 23:165-75 (2005), Kariko K et al. Mol Ther 16:1833-40 (2008), Anderson B R et al. NAR (2010); each of which is herein incorporated by reference in their entirety).

[1094] The ORF may also include various upstream or downstream additions (such as, but not limited to, β-globin, tags, etc.) may be ordered from an optimization service such as, but limited to, DNA2.0 (Menlo Park, Calif.) and may contain multiple cloning sites which may have XbaI recognition. Upon receipt of the construct, it may be reconstituted and transformed into chemically competent E. coli.

[1095] For the present invention, NEB DH5-alpha Competent E. coli are used. Transformations are performed according to NEB instructions using 100 ng of plasmid. The protocol is as follows:
[1096] 1. Thaw a tube of NEB 5-alpha Competent E. coli cells on ice for 10 minutes.
[1097] 2. Add 1-5 μl containing 1 pg-100 ng of plasmid DNA to the cell mixture. Carefully flick the tube 4-5 times to mix cells and DNA. Do not vortex.
[1098] 3. Place the mixture on ice for 30 minutes. Do not mix.
[1099] 4. Heat shock at 42° C. for exactly 30 seconds. Do not mix.
[1100] 5. Place on ice for 5 minutes. Do not mix.
[1101] 6. Pipette 950 μl of room temperature SOC into the mixture.
[1102] 7. Place at 37° C. for 60 minutes. Shake vigorously (250 rpm) or rotate.
[1103] 8. Warm selection plates to 37° C.
[1104] 9. Mix the cells thoroughly by flicking the tube and inverting.

[1105] Alternatively, incubate at 30° C. for 24-36 hours or 25° C. for 48 hours.

[1106] A single colony is then used to inoculate 5 ml of LB growth media using the appropriate antibiotic and then allowed to grow (250 RPM, 37° C.) for 5 hours. This is then used to inoculate a 200 ml culture medium and allowed to grow overnight under the same conditions.

[1107] To isolate the plasmid (up to 850 μg), a maxi prep is performed using the Invitrogen PURELINK™ HiPure Maxiprep Kit (Carlsbad, Calif.), following the manufacturer's instructions.

[1108] In order to generate cDNA for In Vitro Transcription (IVT), the plasmid (an Example of which is shown in FIG. 3) is first linearized using a restriction enzyme such as XbaI. A typical restriction digest with XbaI will comprise the following: Plasmid 1.0 μg; 10× Buffer 1.0 μl; XbaI 1.5 μl; dH₂0 up to 10 μl; incubated at 37° C. for 1 hr. If performing at lab scale (<5 μg), the reaction is cleaned up using Invitrogen's PURELINK™ PCR Micro Kit (Carlsbad, Calif.) per manufacturer's instructions. Larger scale purifications may need to be done with a product that has a larger load capacity such as Invitrogen's standard PURELINK™ PCR Kit (Carlsbad, Calif.). Following the cleanup, the linearized vector is quantified using the NanoDrop and analyzed to confirm linearization using agarose gel electrophoresis.

[1109] As a non-limiting example, G-CSF may represent the polypeptide of interest. Sequences used in the steps outlined in Examples 1-5 are shown in Table 11. It should be noted that the start codon (ATG) has been underlined in each sequence of Table 11.

TABLE 11
G-CSF Sequences

| SEQ | |
|---|---|
| ID | |
| NO | Description |
| 405 | cDNAsequence: |
| | ATGGCTGGACCTGCCACCCAGAGCCCCATGAAGCTGATGGCCCTGCAGCTGCT |
| | GCTGTGGCACAGTGCACTCTGGACAGTGCAGGAAGCCACCCCCCTGGGCCCTG |
| | CCAGCTCCCTGCCCCAGAGCTTCCTGCTCAAGTGCTTAGAGCAAGTGAGGAAG |
| | ATCCAGGGCGATGGCGCAGCGCTCCAGGAGAAGCTGTGTGCCACCTACAAGCT |
| | GTGCCACCCCGAGGAGCTGGTGCTGCTCGGACACTCTCTGGGCATCCCCTGGG |
| | CTCCCCTGAGCAGCTGCCCCAGCCAGGCCCTGCAGCTGGCAGGCTGCTTGAGC |
| | CAACTCCATAGCGGCCTTTTCCTCTACCAGGGGCTCCTGCAGGCCCTGGAAGGG |
| | ATCTCCCCCGAGTTGGGTCCCACCTTGGACACACTGCAGCTGGACGTCGCCGAC |
| | TTTGCCACCACCATCTGGCAGCAGATGGAAGAACTGGGAATGGCCCCTGCCCT |
| | GCAGCCCACCCAGGGTGCCATGCCGGCCTTCGCCTCTGCTTTCCAGCGCCGGGC |
| | AGGAGGGGTCCTGGTTGCCTCCCATCTGCAGAGCTTCCTGGAGGTGTCGTACCG |
| | CGTTCTACGCCACCTTGCCCAGCCCTGA |
| 406 | cDNA having T7 polymerase site, AfeI and Xba |
| | restriction site: |
| | TAATACGACTCACTATA |
| | GGGAAATAAGAGAGAAAAGAAGAGTAAGAAGAAATATAAGAGCCACC |
| | ATGGCTGGACCTGCCACCCAGAGCCCCATGAAGCTGATGGCCCTGCAGCTGCT |
| | GCTGTGGCACAGTGCACTCTGGACAGTGCAGGAAGCCACCCCCCTGGGCCCTG |
| | CCAGCTCCCTGCCCCAGAGCTTCCTGCTCAAGTGCTTAGAGCAAGTGAGGAAG |
| | ATCCAGGGCGATGGCGCAGCGCTCCAGGAGAAGCTGTGTGCCACCTACAAGCT |
| | GTGCCACCCCGAGGAGCTGGTGCTGCTCGGACACTCTCTGGGCATCCCCTGGG |
| | CTCCCCTGAGCAGCTGCCCCAGCCAGGCCCTGCAGCTGGCAGGCTGCTTGAGC |
| | CAACTCCATAGCGGCCTTTTCCTCTACCAGGGGCTCCTGCAGGCCCTGGAAGGG |
| | ATCTCCCCCGAGTTGGGTCCCACCTTGGACACACTGCAGCTGGACGTCGCCGAC |
| | TTTGCCACCACCATCTGGCAGCAGATGGAAGAACTGGGAATGGCCCCTGCCCT |
| | GCAGCCCACCCAGGGTGCCATGCCGGCCTTCGCCTCTGCTTTCCAGCGCCGGGC |
| | AGGAGGGGTCCTGGTTGCCTCCCATCTGCAGAGCTTCCTGGAGGTGTCGTACCG |
| | CGTTCTACGCCACCTTGCCCAGCCCTGA |
| | AGCGCTGCCTTCTGCGGGGCTTGCCTTCTGGCCATGCCCTTCTTCTCTCCCTTGC |
| | ACCTGTACCTCTTGGTCTTTGAATAAAGCCTGAGTAGGAAGGCGGCCGCTCGA |
| | GCATGCATCTAGA |
| 407 | Optimized sequence; containing T7 polymerase site, |
| | AfeI and Xba restriction site |
| | TAATACGACTCACTATA |
| | GGGAAATAAGAGAGAAAAGAAGAGTAAGAAGAAATATAAGAGCCACC |
| | ATGGCCGGTCCCGCGACCCAAAGCCCCATGAAACTTATGGCCCTGCAGTTGCT |
| | GCTTTGGCACTCGGCCCTCTGGACAGTCCAAGAAGCGACTCCTCTCGGACCTGC |
| | CTCATCGTTGCCGCAGTCATTCCTTTTGAAGTGTCTGGAGCAGGTGCGAAAGAT |
| | TCAGGGCGATGGAGCCGCACTCCAAGAGAAGCTCTGCGCGACATACAAACTTT |
| | GCCATCCCGAGGAGCTCGTACTGCTCGGGCACAGCTTGGGGATTCCCTGGGCT |
| | CCTCTCTCGTCCTGTCCGTCGCAGGCTTTGCAGTTGGCAGGGTGCCTTTCCCAG |
| | CTCCACTCCGGTTTGTTCTTGTATCAGGGACTGCTGCAAGCCCTTGAGGGAATC |
| | TCGCCAGAATTGGGCCCGACGCTGGACACGTTGCAGCTCGACGTGGCGGATTT |
| | CGCAACAACCATCTGGCAGCAGATGGAGGAACTGGGGATGGCACCCGCGCTGC |
| | AGCCCACGCAGGGGGCAATGCCGGCCTTTGCGTCCGCGTTTCAGCGCAGGGCG |
| | GGTGGAGTCCTCGTAGCGAGCCACCTTCAATCATTTTTGGAAGTCTCGTACCGG |
| | GTGCTGAGACATCTTGCGCAGCCGTGA |
| | AGCGCTGCCTTCTGCGGGGCTTGCCTTCTGGCCATGCCCTTCTTCTCTCCCTTGC |
| | ACCTGTACCTCTTGGTCTTTGAATAAAGCCTGAGTAGGAAGGCGGCCGCTCGA |
| | GCATGCATCTAGA |
| 408 | mRNA sequence (transcribed) |
| | GGGAAAUAAGAGAGAAAAGAAGAGUAAGAAGAAAUAUAAGAGCCACC |
| | AUGGCCGGUCCCGCGACCCAAAGCCCCAUGAAACUUAUGGCCCUGCAGUUGC |
| | UGCUUUGGCACUCGGCCCUCUGGACAGUCCAAGAAGCGACUCCUCUCGGACC |
| | UGCCUCAUCGUUGCCGCAGUCAUUCCUUUUGAAGUGUCUGGAGCAGGUGCG |
| | AAAGAUUCAGGGCGAUGGAGCCGCACUCCAAGAGAAGCUCUGCGCGACAUA |
| | CAAACUUUGCCAUCCCGAGGAGCUCGUACUGCUCGGGCACAGCUUGGGGAUU |
| | CCCUGGGCUCCUCUCUCGUCCUGUCCGUCGCAGGCUUUGCAGUUGGCAGGGU |
| | GCCUUUCCCAGCUCCACUCCGGUUUGUUCUUGUAUCAGGGACUGCUGCAAGC |
| | CCUUGAGGGAAUCUCGCCAGAAUUGGGCCCGACGCUGGACACGUUGCAGCUC |
| | GACGUGGCGGAUUUCGCAACAACCAUCUGGCAGCAGAUGGAGGAACUGGGG |
| | AUGGCACCCGCGCUGCAGCCCACGCAGGGGGCAAUGCCGGCCUUUGCGUCCG |
| | CGUUUCAGCGCAGGGCGGGUGGAGUCCUCGUAGCGAGCCACCUUCAAUCAUU |
| | UUUGGAAGUCUCGUACCGGGUGCUGAGACAUCUUGCGCAGCCGUGA |
| | AGCGCUGCCUUCUGCGGGGCUUGCCUUCUGGCCAUGCCCUUCUUCUCUCCCU |
| | UGCACCUGUACCUCUUGGUCUUUGAAUAAAGCCUGAGUAGGAAG |

### Example 2

### PCR for cDNA Production

[1110] PCR procedures for the preparation of cDNA are performed using 2×KAPA HIFI™ HotStart ReadyMix by Kapa Biosystems (Woburn, Mass.). This system includes 2×KAPA ReadyMix12.5 μl; Forward Primer (10 uM) 0.75 μl; Reverse Primer (10 uM) 0.75 μl; Template cDNA 100 ng; and dH₂0 diluted to 25.0 μl. The reaction conditions are at 95° C. for 5 min. and 25 cycles of 98° C. for 20 sec, then 58° C. for 15 sec, then 72° C. for 45 sec, then 72° C. for 5 min. then 4° C. to termination.

[1111] The reverse primer of the instant invention incorporates a poly-T₁₂₀ for a poly-A₁₂₀ in the mRNA. Other reverse primers with longer or shorter poly(T) tracts can be used to adjust the length of the poly(A) tail in the mRNA.

[1112] The reaction is cleaned up using Invitrogen's PURELINK™ PCR Micro Kit (Carlsbad, Calif.) per manufacturer's instructions (up to 5 μg). Larger reactions will require a cleanup using a product with a larger capacity. Following the cleanup, the cDNA is quantified using the NanoDrop and analyzed by agarose gel electrophoresis to confirm the cDNA is the expected size. The cDNA is then submitted for sequencing analysis before proceeding to the in vitro transcription reaction.

### Example 3

### In Vitro Transcription (IVT)

[1113] The in vitro transcription reaction generates mRNA containing modified nucleotides or modified RNA. The input nucleotide triphosphate (NTP) mix is made in-house using natural and un-natural NTPs.

[1114] A typical in vitro transcription reaction includes the following:

| | | | |
|---|---|---|---|
| 1. | Template cDNA | 1.0 | μg |
| 2. | 10x transcription buffer (400 mM Tris-HCl pH 8.0, | 2.0 | μl |
| | 190 mM MgCl₂, 50 mM DTT, 10 mM Spermidine) | | |
| 3. | Custom NTPs (25 mM each) | 7.2 | μl |
| 4. | RNase Inhibitor | 20 | U |
| 5. | T7 RNA polymerase | 3000 | U |

| | | |
|---|---|---|
| 6. | dH₂0 | Up to 20.0 μl. and |
| 7. | Incubation at 37° C. for 3 hr-5 hrs. | |

[1115] The crude IVT mix may be stored at 4° C. overnight for cleanup the next day. 1 U of RNase-free DNase is then used to digest the original template. After 15 minutes of incubation at 37° C., the mRNA is purified using Ambion's MEGACLEAR™ Kit (Austin, Tex.) following the manufacturer's instructions. This kit can purify up to 500 μg of RNA. Following the cleanup, the RNA is quantified using the NanoDrop and analyzed by agarose gel electrophoresis to confirm the RNA is the proper size and that no degradation of the RNA has occurred.

### Example 4

### Enzymatic Capping of mRNA

[1116] Capping of the mRNA is performed as follows where the mixture includes: IVT RNA 60 μg-180 μg and dH₂0 up to 72 μl. The mixture is incubated at 65° C. for 5 minutes to denature RNA, and then is transferred immediately to ice.

[1117] The protocol then involves the mixing of 10× Capping Buffer (0.5 M Tris-HCl (pH 8.0), 60 mM KCl, 12.5 mM MgCl₂) (10.0 μl); 20 mM GTP (5.0 μl); 20 mM S-Adenosyl Methionine (2.5 μl); RNase Inhibitor (100 U); 2′-O-Methyltransferase (400U); Vaccinia capping enzyme (Guanylyl transferase) (40 U); dH₂0 (Up to 28 μl); and incubation at 37° C. for 30 minutes for 60 μg RNA or up to 2 hours for 180 μg of RNA.

[1118] The mRNA is then purified using Ambion's MEGACLEAR™ Kit (Austin, Tex.) following the manufacturer's instructions. Following the cleanup, the RNA is quantified using the NANODROP™ (ThermoFisher, Waltham, Mass.) and analyzed by agarose gel electrophoresis to confirm the RNA is the proper size and that no degradation of the RNA has occurred. The RNA product may also be sequenced by running a reverse-transcription-PCR to generate the cDNA for sequencing.

### Example 5

### PolyA Tailing Reaction

[1119] Without a poly-T in the cDNA, a poly-A tailing reaction must be performed before cleaning the final product. This is done by mixing Capped IVT RNA (100 μl); RNase Inhibitor (20 U); 10× Tailing Buffer (0.5 M Tris-HCl (pH 8.0), 2.5 M NaCl, 100 mM MgCl₂)(12.0 μl); 20 mM ATP (6.0 μl); Poly-A Polymerase (20 U); dH₂0 up to 123.5 μl and incubation at 37° C. for 30 min. If the poly-A tail is already in the transcript, then the tailing reaction may be skipped and proceed directly to cleanup with Ambion's MEGACLEAR™ kit (Austin, Tex.) (up to 500 μg). Poly-A Polymerase is preferably a recombinant enzyme expressed in yeast.

[1120] For studies performed and described herein, the poly-A tail is encoded in the IVT template to comprise 160 nucleotides in length. However, it should be understood that the processivity or integrity of the polyA tailing reaction may not always result in exactly 160 nucleotides. Hence polyA tails of approximately 160 nucleotides, e.g, about 150-165, 155, 156, 157, 158, 159, 160, 161, 162, 163, 164 or 165 are within the scope of the invention.

### Example 6

### Natural 5′ Caps and 5′ Cap Analogues

[1121] 5′-capping of modified RNA may be completed concomitantly during the in vitro-transcription reaction using the following chemical RNA cap analogs to generate the 5′-guanosine cap structure according to manufacturer protocols: 3′-O-Me-m7G(5′)ppp(5′) G [the ARCA cap]; G(5)ppp(5′)A; G(5′)ppp(5′)G; m7G(5′)ppp(5′)A; m7G(5′)ppp(5′)G (New England BioLabs, Ipswich, Mass.). 5′-capping of modified RNA may be completed post-transcriptionally using a Vaccinia Virus Capping Enzyme to generate the “Cap 0” structure: m7G(5′)ppp(5′)G (New England BioLabs, Ipswich, Mass.). Cap 1 structure may be generated using both Vaccinia Virus Capping Enzyme and a 2′-O methyl-transferase to generate: m7G(5′)ppp(5′)G-2′-O-methyl. Cap 2 structure may be generated from the Cap 1 structure followed by the 2′-O-methylation of the 5′-antepenultimate nucleotide using a 2′-O methyl-transferase. Cap 3 structure may be generated from the Cap 2 structure followed by the 2′-O-methylation of the 5′-preantepenultimate nucleotide using a 2′-O methyl-transferase. Enzymes are preferably derived from a recombinant source.

[1122] When transfected into mammalian cells, the modified mRNAs have a stability of between 12-18 hours or more than 18 hours, e.g., 24, 36, 48, 60, 72 or greater than 72 hours.

### Example 7

### Capping

[1123] A. Protein Expression Assay

[1124] Synthetic mRNAs encoding human G-CSF (cDNA shown in SEQ ID NO: 405; mRNA sequence fully modified with 5-methylcytosine at each cytosine and pseudouridine replacement at each uridine site shown in SEQ ID NO: 408 with a polyA tail approximately 160 nucleotides in length not shown in sequence) containing the ARCA (3′ O-Me-m7G(5′)ppp(5′)G) cap analog or the Cap1 structure can be transfected into human primary keratinocytes at equal concentrations. 6, 12, 24 and 36 hours post-transfection the amount of G-CSF secreted into the culture medium can be assayed by ELISA. Synthetic mRNAs that secrete higher levels of G-CSF into the medium would correspond to a synthetic mRNA with a higher translationally-competent Cap structure.

[1125] B. Purity Analysis Synthesis

[1126] Synthetic mRNAs encoding human G-CSF (cDNA shown in SEQ ID NO: 405; mRNA sequence fully modified with 5-methylcytosine at each cytosine and pseudouridine replacement at each uridine site shown in SEQ ID NO: 408 with a polyA tail approximately 160 nucleotides in length not shown in sequence) containing the ARCA cap analog or the Cap1 structure crude synthesis products can be compared for purity using denaturing Agarose-Urea gel electrophoresis or HPLC analysis. Synthetic mRNAs with a single, consolidated band by electrophoresis correspond to the higher purity product compared to a synthetic mRNA with multiple bands or streaking bands. Synthetic mRNAs with a single HPLC peak would also correspond to a higher purity product. The capping reaction with a higher efficiency would provide a more pure mRNA population.

[1127] C. Cytokine Analysis

[1128] Synthetic mRNAs encoding human G-CSF (cDNA shown in SEQ ID NO: 405; mRNA sequence fully modified with 5-methylcytosine at each cytosine and pseudouridine replacement at each uridine site shown in SEQ ID NO: 408 with a polyA tail approximately 160 nucleotides in length not shown in sequence) containing the ARCA cap analog or the Cap1 structure can be transfected into human primary keratinocytes at multiple concentrations. 6, 12, 24 and 36 hours post-transfection the amount of pro-inflammatory cytokines such as TNF-alpha and IFN-beta secreted into the culture medium can be assayed by ELISA. Synthetic mRNAs that secrete higher levels of pro-inflammatory cytokines into the medium would correspond to a synthetic mRNA containing an immune-activating cap structure.

[1129] D. Capping Reaction Efficiency

[1130] Synthetic mRNAs encoding human G-CSF (cDNA shown in SEQ ID NO: 405; mRNA sequence fully modified with 5-methylcytosine at each cytosine and pseudouridine replacement at each uridine site shown in SEQ ID NO: 408 with a polyA tail approximately 160 nucleotides in length not shown in sequence) containing the ARCA cap analog or the Cap1 structure can be analyzed for capping reaction efficiency by LC-MS after capped mRNA nuclease treatment. Nuclease treatment of capped mRNAs would yield a mixture of free nucleotides and the capped 5′-5-triphosphate cap structure detectable by LC-MS. The amount of capped product on the LC-MS spectra can be expressed as a percent of total mRNA from the reaction and would correspond to capping reaction efficiency. The cap structure with higher capping reaction efficiency would have a higher amount of capped product by LC-MS.

### Example 8

### Agarose Gel Electrophoresis of Modified RNA or RT PCR Products

[1131] Individual modified RNAs (200-400 ng in a 20 μl volume) or reverse transcribed PCR products (200-400 ng) are loaded into a well on a non-denaturing 1.2% Agarose E-Gel (Invitrogen, Carlsbad, Calif.) and run for 12-15 minutes according to the manufacturer protocol.

### Example 9

### Nanodrop Modified RNA Quantification and UV Spectral Data

[1132] Modified RNAs in TE buffer (1 μl) are used for Nanodrop UV absorbance readings to quantitate the yield of each modified RNA from an in vitro transcription reaction.

### Example 10

### Method of Screening for Protein Expression

### A. Electrospray Ionization

[1133] A biological sample which may contain proteins encoded by modified RNA administered to the subject is prepared and analyzed according to the manufacturer protocol for electrospray ionization (ESI) using 1, 2, 3 or 4 mass analyzers. A biologic sample may also be analyzed using a tandem ESI mass spectrometry system.

[1134] Patterns of protein fragments, or whole proteins, are compared to known controls for a given protein and identity is determined by comparison.

### B. Matrix-Assisted Laser Desorption/Ionization

[1135] A biological sample which may contain proteins encoded by modified RNA administered to the subject is prepared and analyzed according to the manufacturer protocol for matrix-assisted laser desorption/ionization (MALDI).

[1136] Patterns of protein fragments, or whole proteins, are compared to known controls for a given protein and identity is determined by comparison.

### C. Liquid Chromatography-Mass Spectrometry-Mass Spectrometry

[1137] A biological sample, which may contain proteins encoded by modified RNA, may be treated with a trypsin enzyme to digest the proteins contained within. The resulting peptides are analyzed by liquid chromatography-mass spectrometry-mass spectrometry (LC/MS/MS). The peptides are fragmented in the mass spectrometer to yield diagnostic patterns that can be matched to protein sequence databases via computer algorithms. The digested sample may be diluted to achieve 1 ng or less starting material for a given protein. Biological samples containing a simple buffer background (e.g. water or volatile salts) are amenable to direct in-solution digest; more complex backgrounds (e.g. detergent, non-volatile salts, glycerol) require an additional clean-up step to facilitate the sample analysis.

[1138] Patterns of protein fragments, or whole proteins, are compared to known controls for a given protein and identity is determined by comparison.

### Example 11

### Chemical Modification Ranges of Modified mRNA

[1139] Modified nucleosides such as, but not limited to, the chemical modifications 5-methylcytosine and pseudouridine have been shown to lower the innate immune response and increase expression of RNA in mammalian cells. Surprisingly and not previously known, the effects manifested by these chemical modifications can be titrated when the amount of chemical modification of a particular nucleotide is less than 100%. Previously, it was believed that the benefit of chemical modification could be derived using less than complete replacement of a modified nucleoside and published reports suggest no loss of benefit until the level of substitution with a modified nucleoside is less than 50% (Kariko et al., Immunity (2005) 23:165-175).

[1140] However, it has now been shown that the benefits of chemical modification are directly correlated with the degree of chemical modification and must be considered in view of more than a single measure of immune response. Such benefits include enhanced protein production or mRNA translation and reduced or avoidance of stimulating the innate immune response as measured by cytokine profiles and metrics of immune response triggers.

[1141] Enhanced mRNA translation and reduced or lack of innate immune stimulation are seen with 100% substitution with a modified nucleoside. Lesser percentages of substitution result in less mRNA translation and more innate immune stimulation, with unmodified mRNA showing the lowest translation and the highest innate immune stimulation.

### In Vitro PBMC Studies: Percent Modification

[1142] 480 ng of G-CSF mRNA modified with 5-methylcytosine (5mC) and pseudouridine (pseudoU) or unmodified G-CSF mRNA was transfected with 0.4 uL of Lipofectamine 2000 into peripheral blood mononuclear cells (PBMC) from three normal blood donors (D1, D2, and D3). The G-CSF mRNA (SEQ ID NO: 408; polyA tail of approximately 160 nucleotides not shown in sequence; 5′cap, Cap1) was completely modified with 5mC and pseudo (100% modification), not modified with 5mC and pseudo (0% modification) or was partially modified with 5mC and pseudoU so the mRNA would contain 75% modification, 50% modification or 25% modification. A control sample of Luciferase (mRNA sequence shown in SEQ ID NO: 409; polyA tail of approximately 160 nucleotides not shown in sequence; 5′cap, Cap1; fully modified 5meC and pseudoU) was also analyzed for G-CSF expression. For TNF-alpha and IFN-alpha control samples of Lipofectamine2000, LPS, R-848, Luciferase (mRNA sequence shown in SEQ ID NO: 409; polyA tail of approximately 160 nucleotides not shown in sequence; 5′cap, Cap1; fully modified 5mC and pseudo), and P(I)P(C) were also analyzed. The supernatant was harvested and run by ELISA 22 hours after transfection to determine the protein expression. The expression of G-CSF is shown in Table 12 and the expression of IFN-alpha and TNF-alpha is shown in Table 8. The expression of IFN-alpha and TNF-alpha may be a secondary effect from the transfection of the G-CSF mRNA. Tables 12, 13 show that the amount of chemical modification of G-CSF, interferon alpha (IFN-alpha) and tumor necrosis factor-alpha (TNF-alpha) is titratable when the mRNA is not fully modified and the titratable trend is not the same for each target.

[1143] As mentioned above, using PBMC as an in vitro assay system it is possible to establish a correlation between translation (in this case G-CSF protein production) and cytokine production (in this case exemplified by IFN-alpha protein production). Better protein production is correlated with lower induction of innate immune activation pathway, and the percentage modification of a chemistry can be judged favorably based on this ratio (Table 14). As calculated from Tables 12 and 13 and shown in Table 14, full modification with 5-methylcytidine and pseudouridine shows a much better ratio of protein cytokine production than without any modification (natural G-CSF mRNA) (100-fold for IFN-alpha and 27-fold for TNF-alpha). Partial modification shows a linear relationship with increasingly less modification resulting in a lower protein cytokine ratio.

TABLE 12
G-CSF Expression

| | G-CSF Expression (pg/ml) | | |
|---|---|---|---|
| | D1 | D2 | D3 |
| 100% modification | 1968.9 | 2595.6 | 2835.7 |
| 75% modification | 566.7 | 631.4 | 659.5 |
| 50% modification | 188.9 | 187.2 | 191.9 |
| 25% modification | 139.3 | 126.9 | 102.0 |
| 0% modification | 194.8 | 182.0 | 183.3 |
| Luciferase | 90.2 | 0.0 | 22.1 |

TABLE 13
IFN-alpha and TNF-alpha Expression

| | IFN-alpha Expression | | | TNF-alpha Expression | | |
|---|---|---|---|---|---|---|
| | (pg/ml) | | | (pg/ml) | | |
| | D1 | D2 | D3 | D1 | D2 | D3 |
| 100% modification | 336.5 | 78.0 | 46.4 | 115.0 | 15.0 | 11.1 |
| 75% modification | 339.6 | 107.6 | 160.9 | 107.4 | 21.7 | 11.8 |
| 50% modification | 478.9 | 261.1 | 389.7 | 49.6 | 24.1 | 10.4 |
| 25% modification | 564.3 | 400.4 | 670.7 | 85.6 | 26.6 | 19.8 |
| 0% modification | 1421.6 | 810.5 | 1260.5 | 154.6 | 96.8 | 45.9 |
| LPS | 0.0 | 0.6 | 0.0 | 0.0 | 12.6 | 4.3 |
| R-848 | 0.5 | 3.0 | 14.1 | 655.2 | 989.9 | 420.4 |
| P(I)P(C) | 130.8 | 297.1 | 585.2 | 765.8 | 2362.7 | 1874.4 |
| Lipid only | 1952.2 | 866.6 | 855.8 | 248.5 | 82.0 | 60.7 |

TABLE 14
PC Ratio and Effect of Percentage of Modification

| | Average | Average | Average | G-CSF/ | G-CSF/ |
|---|---|---|---|---|---|
| % | G-CSF | IFN-a | TNF-a | IFN-alpha | TNF-alpha |
| Modification | (pg/ml) | (pg/ml) | (pg/ml) | (PC ratio) | (PC ratio) |
| 100 | 2466 | 153 | 47 | 16 | 52 |
| 75 | 619 | 202 | 47 | 3.1 | 13 |
| 50 | 189 | 376 | 28 | 0.5 | 6.8 |
| 25 | 122 | 545 | 44 | 0.2 | 2.8 |
| 0 | 186 | 1164 | 99 | 0.16 | 1.9 |

### Example 12

### Toxicity of Nucleoside Triphosphates (NTPs)

[1144] The cytotoxicity of natural and modified nucleoside triphosphates (NTPs) alone or in combination with other bases, was analyzed in human embryonic kidney 293 (HEK293) cells in the absence of transfection reagent. HEK293 cells were seeded on 96-well plates at a density of 30,000 cells per well having 0.75 ul of RNAiMAX™ (Invitrogen, Carlsbad, Calif.) per well at a total well volume of 100 ul. 10 ul of the NTPs outlined in Table 12 were combined with 10 ul of lipid dilution and incubated for 30 minutes to form a complex before 80 ul of the HEK293 cell suspension was added to the NTP complex.

[1145] Natural and modified NTPs were transfected at a concentration of 2.1 nM, 21 nM, 210 nM, 2.1 um, 21 uM, 210 um or 2.1 mM. NTPs in combination were transfected at a total concentration of NTPs of 8.4 nM, 84 nM, 840 nM, 8.4 uM, 84 uM, 840 uM and 8.4 mM. As a control modified G-CSF mRNA (SEQ ID NO: 408; polyA tail of approximately 160 nucleotides not shown in sequence; 5′cap, Cap1; fully modified 5-methylcytosine and pseudouridine) was transfected in HEK293 cells at a concentration of 8.4 nM. The cytotoxicity of the NTPs and the modified G-CSF mRNA was assayed at 4, 24, 48 and 72 hours post addition to the HEK293 cells using a CYTO TOX-GLO™ assay from Promega (Madison, Wis.) following the manufacturer protocol except pippeting was used for lysing the cells instead of shaking the plates.

[1146] Table 15 and 16 show the percent of viable cells for each of the NTPs, NTP combinations and controls tested. There was no toxicity seen with the individual NTPs as compared to the untreated cells. These data demonstrate that introduction of individual NTPs, including 5-methylcytidine, pseudouridine, and N1-methylpseudouridine, into mammalian cells is not toxic at doses 1,000,000 times an effective dose when introduced as a modified mRNA.

TABLE 15
Cytotoxicity of Individual NTPs
Individual NTP Cytotoxicity

| | | Dose | | | | | | |
|---|---|---|---|---|---|---|---|---|
| | | 2.1 | 210 | 21 | 2.1 | 210 | 21 | 2.1 |
| | Time | mM | uM | uM | uM | nM | nM | nM |
| Adenine | 4 hr | 90.03 | 85.97 | 91.20 | 90.23 | 90.36 | 93.21 | 93.48 |
| | 24 hr | 88.42 | 87.31 | 86.86 | 86.81 | 86.94 | 87.19 | 86.44 |
| | 48 hr | 93.71 | 90.55 | 89.94 | 89.80 | 89.17 | 91.13 | 92.12 |
| | 72 hr | 97.49 | 94.81 | 93.83 | 94.58 | 92.22 | 93.88 | 95.74 |
| Cytosine | 4 hr | 90.51 | 89.88 | 91.41 | 90.49 | 88.95 | 93.11 | 93.34 |
| | 24 hr | 86.92 | 86.33 | 85.72 | 86.70 | 86.12 | 86.16 | 85.78 |
| | 48 hr | 94.23 | 87.81 | 87.28 | 87.73 | 85.36 | 88.95 | 88.99 |
| | 72 hr | 97.15 | 92.34 | 92.22 | 88.93 | 88.22 | 91.80 | 94.22 |
| Guanine | 4 hr | 90.96 | 90.14 | 91.36 | 90.60 | 90.00 | 92.84 | 93.33 |
| | 24 hr | 86.37 | 85.86 | 85.93 | 86.13 | 86.35 | 85.50 | 85.41 |
| | 48 hr | 93.83 | 87.05 | 88.18 | 87.89 | 85.31 | 87.92 | 89.57 |
| | 72 hr | 97.04 | 91.41 | 92.39 | 92.30 | 92.19 | 92.55 | 93.72 |
| Uracil | 4 hr | 90.97 | 89.60 | 91.95 | 90.90 | 91.05 | 92.90 | 93.15 |
| | 24 hr | 87.68 | 86.48 | 85.89 | 86.75 | 86.52 | 87.23 | 87.63 |
| | 48 hr | 94.39 | 88.98 | 89.11 | 89.44 | 88.33 | 88.89 | 91.28 |
| | 72 hr | 96.82 | 93.45 | 93.63 | 94.60 | 94.50 | 94.53 | 95.51 |
| Pseudo- | 4 hr | 92.09 | 92.37 | 91.35 | 92.02 | 92.84 | 91.96 | 92.26 |
| uridine | 24 hr | 88.38 | 86.68 | 86.05 | 86.75 | 85.91 | 87.59 | 87.31 |
| | 48 hr | 88.62 | 87.79 | 87.73 | 87.66 | 87.82 | 89.03 | 91.99 |
| | 72 hr | 96.87 | 89.82 | 94.23 | 93.54 | 92.37 | 94.26 | 94.25 |
| 5-methyl | 4 hr | 92.01 | 91.54 | 91.16 | 91.31 | 92.31 | 91.40 | 92.23 |
| cytosine | 24 hr | 87.97 | 85.76 | 84.72 | 85.14 | 84.71 | 86.37 | 86.35 |
| | 48 hr | 87.29 | 85.94 | 85.74 | 86.18 | 86.44 | 87.10 | 88.18 |
| | 72 hr | 96.08 | 88.10 | 92.26 | 90.92 | 89.97 | 92.10 | 91.93 |
| N1-methyl | 4 hr | 92.45 | 91.43 | 91.48 | 90.41 | 92.15 | 91.44 | 91.89 |
| pseudo- | 24 hr | 88.92 | 86.48 | 85.17 | 85.72 | 85.89 | 86.85 | 87.79 |
| uridine | 48 hr | 89.84 | 86.02 | 87.52 | 85.85 | 87.38 | 86.72 | 87.81 |
| | 72 hr | 96.80 | 93.03 | 93.83 | 92.25 | 92.40 | 92.84 | 92.98 |
| Untreated | 4 hr | 92.77 | — | — | — | — | — | — |
| | 24 hr | 87.52 | — | — | — | — | — | — |
| | 48 hr | 92.95 | — | — | — | — | — | — |
| | 72 hr | 96.97 | — | — | — | — | — | — |

TABLE 16
Cytotoxicity of NTPs in Combination
NTP Combination Cytotoxicity

| | | Dose | | | | | | |
|---|---|---|---|---|---|---|---|---|
| | | 8.4 | 840 | 84 | 8.4 | 840 | 84 | 8.4 |
| | Time | mM | uM | uM | uM | nM | nM | nM |
| Pseudouridine/ | 4 hr | 92.27 | 92.04 | 91.47 | 90.86 | 90.87 | 91.10 | 91.50 |
| 5- | 24 hr | 88.51 | 86.90 | 86.43 | 88.15 | 88.46 | 86.28 | 87.51 |
| methylcytosine/ | 48 hr | 88.30 | 87.36 | 88.58 | 88.13 | 87.39 | 88.72 | 90.55 |
| Adenine/ | 72 hr | 96.53 | 94.42 | 94.31 | 94.53 | 94.38 | 94.36 | 93.65 |
| Guanine | | | | | | | | |
| N1-methyl | 4 hr | 92.31 | 91.71 | 91.36 | 91.15 | 91.30 | 90.86 | 91.38 |
| pseudouridine/ | 24 hr | 88.19 | 87.07 | 86.46 | 87.70 | 88.13 | 85.30 | 87.21 |
| 5- | 48 hr | 87.17 | 86.53 | 87.51 | 85.85 | 84.69 | 87.73 | 86.79 |
| methylcytosine/ | 72 hr | 96.40 | 94.88 | 94.40 | 93.65 | 94.82 | 92.72 | 93.10 |
| Adenine/ | | | | | | | | |
| Guanine | | | | | | | | |
| G-CSF | 4 hr | na | na | na | na | na | na | 92.63 |
| modified | 24 hr | na | na | na | na | na | na | 87.53 |
| mRNA | 48 hr | na | na | na | na | na | na | 91.70 |
| | 72 hr | na | na | na | na | na | na | 96.36 |

### Example 13

### Chemical Modification: In Vitro Studies

### A. In Vitro Screening in PBMC

[1147] 500 ng of G-CSF (mRNA sequence shown in SEQ ID NO: 408; polyA tail of approximately 160 nucleotides not shown in sequence; 5′cap, Cap1) mRNA fully modified with the chemical modification outlined Tables 17 and 18 was transfected with 0.4 uL Lipofectamine 2000 into peripheral blood mononuclear cells (PBMC) from three normal blood donors. Control samples of LPS, R848, P(I)P(C) and mCherry (mRNA sequence shown in SEQ ID NO: 410; polyA tail of approximately 160 nucleotides not shown in sequence, 5′cap, Cap1; fully modified with 5-methylcytosine and pseudouridine) were also analyzed. The supernatant was harvested and stored frozen until analyzed by ELISA to determine the G-CSF protein expression, and the induction of the cytokines interferon-alpha (IFN-α) and tumor necrosis factor alpha (TNF-α). The protein expression of G-CSF is shown in Table 17, the expression of IFN-α and TNF-α is shown in Table 18.

[1148] The data in Table 17 demonstrates that many, but not all, chemical modifications can be used to productively produce human G-CSF in PBMC. Of note, 100% N1-methylpseudouridine substitution demonstrates the highest level of human G-CSF production (almost 10-fold higher than pseudouridine itself). When N1-methylpseudouridine is used in combination with 5-methylcytidine a high level of human G-CSF protein is also produced (this is also higher than when pseudouridine is used in combination with 5 methylcytidine).

[1149] Given the inverse relationship between protein production and cytokine production in PBMC, a similar trend is also seen in Table 18, where 100% substitution with N1-methylpseudouridine results no cytokine induction (similar to transfection only controls) and pseudouridine shows detectable cytokine induction which is above background.

[1150] Other modifications such as N6-methyladenosine and α-thiocytidine appear to increase cytokine stimulation.

TABLE 17
Chemical Modifications and G-CSF Protein Expression

| | G-CSF Protein Expression | | |
|---|---|---|---|
| | (pg/ml) | | |
| | Donor | Donor | Donor |
| Chemical Modifications | 1 | 2 | 3 |
| Pseudouridine | 2477 | 1,909 | 1,498 |
| 5-methyluridine | 318 | 359 | 345 |
| N1-methylpseudouridine | 21,495 | 16,550 | 12,441 |
| 2-thiouridine | 932 | 1,000 | 600 |
| 4-thiouridine | 5 | 391 | 218 |
| 5-methoxyuridine | 2,964 | 1,832 | 1,800 |
| 5-methylcytosine and pseudouridine (1^{st} set) | 2,632 | 1,955 | 1,373 |
| 5-methylcytosine and N1-methylpseudouridine | 10,232 | 7,245 | 6,214 |
| (1^{st} set) | | | |
| 2′Fluoroguanosine | 59 | 186 | 177 |
| 2′Fluorouridine | 118 | 209 | 191 |
| 5-methylcytosine and pseudouridine (2^{nd} set) | 1,682 | 1,382 | 1,036 |
| 5-methylcytosine and N1-methylpseudouridine | 9,564 | 8,509 | 7,141 |
| (2^{nd} set) | | | |
| 5-bromouridine | 314 | 482 | 291 |
| 5-(2-carbomethoxyvinyl)uridine | 77 | 286 | 177 |
| 5-[3(1-E-propenylamino)uridine | 541 | 491 | 550 |
| α-thiocytidine | 105 | 264 | 245 |
| 5-methylcytosine and pseudouridine (3^{rd} set) | 1,595 | 1,432 | 955 |
| N1-methyladenosine | 182 | 177 | 191 |
| N6-methyladenosine | 100 | 168 | 200 |
| 5-methylcytidine | 291 | 277 | 359 |
| N4-acetylcytidine | 50 | 136 | 36 |
| 5-formylcytidine | 18 | 205 | 23 |
| 5-methylcytosine and pseudouridine (4^{th} set) | 264 | 350 | 182 |
| 5-methylcytosine and N1-methylpseudouridine | 9,505 | 6,927 | 5,405 |
| (4^{th} set) | | | |
| LPS | 1,209 | 786 | 636 |
| mCherry | 5 | 168 | 164 |
| R848 | 709 | 732 | 636 |
| P(I)P(C) | 5 | 186 | 182 |

TABLE 18
Chemical Modifications and Cytokine Expression

| | IFN-α Expression | | | TNF-α Expression | | |
|---|---|---|---|---|---|---|
| | (pg/ml) | | | (pg/ml) | | |
| | Donor | Donor | Donor | Donor | Donor | Donor |
| Chemical Modifications | 1 | 2 | 3 | 1 | 2 | 3 |
| Pseudouridine | 120 | 77 | 171 | 36 | 81 | 126 |
| 5-methyluridine | 245 | 135 | 334 | 94 | 100 | 157 |
| N1-methylpseudouridine | 26 | 75 | 138 | 101 | 106 | 134 |
| 2-thiouridine | 100 | 108 | 154 | 133 | 133 | 141 |
| 4-thiouridine | 463 | 258 | 659 | 169 | 126 | 254 |
| 5-methoxyuridine | 0 | 64 | 133 | 39 | 74 | 111 |
| 5-methylcytosine and | 88 | 94 | 148 | 64 | 89 | 121 |
| pseudouridine (1^{st} set) | | | | | | |
| 5-methylcytosine and N1- | 0 | 60 | 136 | 54 | 79 | 126 |
| methylpseudouridine | | | | | | |
| (1^{st} set) | | | | | | |
| 2′Fluoroguanosine | 107 | 97 | 194 | 91 | 94 | 141 |
| 2′Fluorouridine | 158 | 103 | 178 | 164 | 121 | 156 |
| 5-methylcytosine and | 133 | 92 | 167 | 99 | 111 | 150 |
| pseudouridine (2^{nd} set) | | | | | | |
| 5-methylcytosine and N1- | 0 | 66 | 140 | 54 | 97 | 149 |
| methylpseudouridine | | | | | | |
| (2^{nd} set) | | | | | | |
| 5-bromouridine | 95 | 86 | 181 | 87 | 106 | 157 |
| 5-(2-carbomethoxyvinyl) | 0 | 61 | 130 | 40 | 81 | 116 |
| uridine | | | | | | |
| 5-[3(1-E-propenylamino) | 0 | 58 | 132 | 71 | 90 | 119 |
| uridine | | | | | | |
| α-thiocytidine | 1,138 | 565 | 695 | 300 | 273 | 277 |
| 5-methylcytosine and | 88 | 75 | 150 | 84 | 89 | 130 |
| pseudouridine (3^{rd} set) | | | | | | |
| N1-methyladeno sine | 322 | 255 | 377 | 256 | 157 | 294 |
| N6-methyladenosine | 1,935 | 1,065 | 1,492 | 1,080 | 630 | 857 |
| 5-methylcytidine | 643 | 359 | 529 | 176 | 136 | 193 |
| N4-acetylcytidine | 789 | 593 | 431 | 263 | 67 | 207 |
| 5-formylcytidine | 180 | 93 | 88 | 136 | 30 | 40 |
| 5-methylcytosine and | 131 | 28 | 18 | 53 | 24 | 29 |
| pseudouridine (4^{th} set) | | | | | | |
| 5-methylcytosine and N1- | 0 | 0 | 0 | 36 | 14 | 13 |
| methylpseudouridine | | | | | | |
| (4^{th} set) | | | | | | |
| LPS | 0 | 67 | 146 | 7,004 | 3,974 | 4,020 |
| mCherry | 100 | 75 | 143 | 67 | 100 | 133 |
| R848 | 674 | 619 | 562 | 11,179 | 8,546 | 9,907 |
| P(I)P(C) | 470 | 117 | 362 | 249 | 177 | 197 |

### B. In Vitro Screening in HeLa Cells

[1151] The day before transfection, 20,000 HeLa cells (ATCC no. CCL-2; Manassas, Va.) were harvested by treatment with Trypsin-EDTA solution (LifeTechnologies, Grand Island, N.Y.) and seeded in a total volume of 100 ul EMEM medium (supplemented with 10% FCS and 1× Glutamax) per well in a 96-well cell culture plate (Corning, Manassas, Va.). The cells were grown at 37oG in 5% CO₂ atmosphere overnight. Next day, 83 ng of Luciferase modified RNA (mRNA sequence shown in SEQ ID NO: 409; polyA tail of approximately 160 nucleotides not shown in sequence; 5′cap, Cap1) with the chemical modification described in Table 19, were diluted in 10 ul final volume of OPTI-MEM (LifeTechnologies, Grand Island, N.Y.). Lipofectamine 2000 (LifeTechnologies, Grand Island, N.Y.) was used as transfection reagent and 0.2 ul were diluted in 10 ul final volume of OPTI-MEM. After 5 minutes of incubation at room temperature, both solutions were combined and incubated an additional 15 minute at room temperature. Then the 20 ul combined solution was added to the 100 ul cell culture medium containing the HeLa cells and incubated at room temperature.

[1152] After 18 to 22 hours of incubation cells expressing luciferase were lysed with 100 ul of Passive Lysis Buffer (Promega, Madison, Wis.) according to manufacturer instructions. Aliquots of the lysates were transferred to white opaque polystyrene 96-well plates (Corning, Manassas, Va.) and combined with 100 ul complete luciferase assay solution (Promega, Madison, Wis.). The lysate volumes were adjusted or diluted until no more than 2 mio relative light units (RLU) per well were detected for the strongest signal producing samples and the RLUs for each chemistry tested are shown in Table 19. The plate reader was a BioTek Synergy H1 (BioTek, Winooski, Vt.). The background signal of the plates without reagent was about 200 relative light units per well.

[1153] These results demonstrate that many, but not all, chemical modifications can be used to productively produce human G-CSF in HeLa cells. Of note, 100% N1-methylpseudouridine substitution demonstrates the highest level of human G-CSF production.

TABLE 19
Relative Light Units of Luciferase

| Chemical Modification | RLU |
|---|---|
| N6-methyladenosine (m6a) | 534 |
| 5-methylcytidine (m5c) | 138,428 |
| N4-acetylcytidine (ac4c) | 235,412 |
| 5-formylcytidine (f5c) | 436 |
| 5-methylcytosine/pseudouridine, test A1 | 48,659 |
| 5-methylcytosine/N1-methylpseudouridine, test A1 | 190,924 |
| Pseudouridine | 655,632 |
| 1-methylpseudouridine (m1u) | 1,517,998 |
| 2-thiouridine (s2u) | 3387 |
| 5-methoxyuridine (mo5u) | 253,719 |
| 5-methylcytosine/pseudouridine, test B1 | 317,744 |
| 5-methylcytosine/N1-methylpseudouridine, test B1 | 265,871 |
| 5-Bromo-uridine | 43,276 |
| 5 (2 carbovinyl) uridine | 531 |
| 5 (3-1E propenyl Amino) uridine | 446 |
| 5-methylcytosine/pseudouridine, test A2 | 295,824 |
| 5-methylcytosine/N1-methylpseudouridine, test A2 | 233,921 |
| 5-methyluridine | 50,932 |
| α-Thio-cytidine | 26,358 |
| 5-methylcytosine/pseudouridine, test B2 | 481,477 |
| 5-methylcytosine/N1-methylpseudouridine, test B2 | 271,989 |
| 5-methylcytosine/pseudouridine, test A3 | 438,831 |
| 5-methylcytosine/N1-methylpseudouridine, test A3 | 277,499 |
| Unmodified Luciferase | 234,802 |

### C. In Vitro Screening in Rabbit Reticulocyte Lysates

[1154] Luciferase mRNA (mRNA sequence shown in SEQ ID NO: 409; polyA tail of approximately 160 nucleotides not shown in sequence; 5′cap, Cap1) was modified with the chemical modification listed in Table 20 and were diluted in sterile nuclease-free water to a final amount of 250 ng in 10 ul. The diluted luciferase was added to 40 ul of freshly prepared Rabbit Reticulocyte Lysate and the in vitro translation reaction was done in a standard 1.5 mL polypropylene reaction tube (Thermo Fisher Scientific, Waltham, Mass.) at 30° C. in a dry heating block. The translation assay was done with the Rabbit Reticulocyte Lysate (nuclease-treated) kit (Promega, Madison, Wis.) according to the manufacturer's instructions. The reaction buffer was supplemented with a one-to-one blend of provided amino acid stock solutions devoid of either Leucine or Methionine resulting in a reaction mix containing sufficient amounts of both amino acids to allow effective in vitro translation.

[1155] After 60 minutes of incubation, the reaction was stopped by placing the reaction tubes on ice. Aliquots of the in vitro translation reaction containing luciferase modified RNA were transferred to white opaque polystyrene 96-well plates (Corning, Manassas, Va.) and combined with 100 ul complete luciferase assay solution (Promega, Madison, Wis.). The volumes of the in vitro translation reactions were adjusted or diluted until no more than 2 mio relative light units (RLUs) per well were detected for the strongest signal producing samples and the RLUs for each chemistry tested are shown in Table 20. The plate reader was a BioTek Synergy H1 (BioTek, Winooski, Vt.). The background signal of the plates without reagent was about 200 relative light units per well.

[1156] These cell-free translation results very nicely correlate with the protein production results in HeLa, with the same modifications generally working or not working in both systems. One notable exception is 5-formylcytidine modified luciferase mRNA which worked in the cell-free translation system, but not in the HeLa cell-based transfection system. A similar difference between the two assays was also seen with 5-formylcytidine modified G-CSF mRNA.

TABLE 20
Relative Light Units of Luciferase

| Chemical Modification | RLU |
|---|---|
| N6-methyladenosine (m6a) | 398 |
| 5-methylcytidine (m5c) | 152,989 |
| N4-acetylcytidine (ac4c) | 60,879 |
| 5-formylcytidine (f5c) | 55,208 |
| 5-methylcytosine/pseudouridine, test A1 | 349,398 |
| 5-methylcytosine/N1-methylpseudouridine, test A1 | 205,465 |
| Pseudouridine | 587,795 |
| 1-methylpseudouridine (m1u) | 589,758 |
| 2-thiouridine (s2u) | 708 |
| 5-methoxyuridine (mo5u) | 288,647 |
| 5-methylcytosine/pseudouridine, test B1 | 454,662 |
| 5-methylcytosine/N1-methylpseudouridine, test B1 | 223,732 |
| 5-Bromo-uridine | 221,879 |
| 5 (2 carbovinyl) uridine | 225 |
| 5 (3-1E propenyl Amino) uridine | 211 |
| 5-methylcytosine/pseudouridine, test A2 | 558,779 |
| 5-methylcytosine/N1-methylpseudouridine, test A2 | 333,082 |
| 5-methyluridine | 214,680 |
| α-Thio-cytidine | 123,878 |
| 5-methylcytosine/pseudouridine, test B2 | 487,805 |
| 5-methylcytosine/N1-methylpseudouridine, test B2 | 154,096 |
| 5-methylcytosine/pseudouridine, test A3 | 413,535 |
| 5-methylcytosine/N1-methylpseudouridine, test A3 | 292,954 |
| Unmodified Luciferase | 225,986 |

### Example 14

### Chemical Modification: In Vivo Studies

[1157] A. In Vivo Screening of G-CSF Modified mRNA

[1158] Balb-C mice (n=4) are intramuscularly injected in each leg with modified G-CSF mRNA (mRNA sequence shown in SEQ ID NO: 401; polyA tail of approximately 160 nucleotides not shown in sequence; 5′cap, Cap1), fully modified with the chemical modifications outlined in Table 21, is formulated in 1×PBS. A control of luciferase modified mRNA (mRNA sequence shown in SEQ ID NO: 409; polyA tail of approximately 160 nucleotides not shown in sequence; 5′cap, Cap1; fully modified with pseudouridine and 5-methylcytosine) and a control of PBS are also tested. After 8 hours serum is collected to determine G-CSF protein levels cytokine levels by ELISA.

TABLE 21
G-CSF

| mRNA | Chemical Modifications |
|---|---|
| G-CSF | Pseudouridine |
| G-CSF | 5-methyluridine |
| G-CSF | 2-thiouridine |
| G-CSF | 4-thiouridine |
| G-CSF | 5-methoxyuridine |
| G-CSF | 2′-fluorouridine |
| G-CSF | 5-bromouridine |
| G-CSF | 5-[3(1-E-propenylamino)uridine) |
| G-CSF | alpha-thio-cytidine |
| G-CSF | 5-methylcytidine |
| G-CSF | N4-acetylcytidine |
| G-CSF | Pseudouridine and 5-methylcytosine |
| G-CSF | N1-methylpseudouridine and 5-methylcytosine |
| Luciferase | Pseudouridine and 5-methylcytosine |
| PBS | None |

B. In Vivo Screening of Luciferase Modified mRNA

[1159] Balb-C mice (n=4) were subcutaneously injected with 200 ul containing 42 to 103 ug of modified luciferase mRNA (mRNA sequence shown in SEQ ID NO: 409; polyA tail of approximately 160 nucleotides not shown in sequence; 5′cap, Cap1), fully modified with the chemical modifications outlined in Table 22, was formulated in 1×PBS. A control of PBS was also tested. The dosages of the modified luciferase mRNA is also outlined in Table 22. 8 hours after dosing the mice were imaged to determine luciferase expression. Twenty minutes prior to imaging, mice were injected intraperitoneally with a D-luciferin solution at 150 mg/kg. Animals were then anesthetized and images were acquired with an IVIS Lumina II imaging system (Perkin Elmer). Bioluminescence was measured as total flux (photons/second) of the entire mouse.

[1160] As demonstrated in Table 22, all luciferase mRNA modified chemistries demonstrated in vivo activity, with the exception of 2′-fluorouridine. In addition 1-methylpseudouridine modified mRNA demonstrated very high expression of luciferase (5-fold greater expression than pseudouridine containing mRNA).

TABLE 22
Luciferase Screening

| | | Dose | Dose | Luciferase |
|---|---|---|---|---|
| | Chemical | (ug) of | volume | expression |
| mRNA | Modifications | mRNA | (ml) | (photon/second) |
| Luciferase | 5-methylcytidine | 83 | 0.72 | 1.94E+07 |
| Luciferase | N4-acetylcytidine | 76 | 0.72 | 1.11E07 |
| Luciferase | Pseudouridine | 95 | 1.20 | 1.36E+07 |
| Luciferase | 1-methylpseudouridine | 103 | 0.72 | 7.40E+07 |
| Luciferase | 5-methoxyuridine | 95 | 1.22 | 3.32+07 |
| Luciferase | 5-methyluridine | 94 | 0.86 | 7.42E+06 |
| Luciferase | 5-bromouridine | 89 | 1.49 | 3.75E+07 |
| Luciferase | 2′-fluoroguanosine | 42 | 0.72 | 5.88E+05 |
| Luciferase | 2′-fluorocytidine | 47 | 0.72 | 4.21E+05 |
| Luciferase | 2′-flurorouridine | 59 | 0.72 | 3.47E+05 |
| PBS | None | — | 0.72 | 3.16E+05 |

### Example 15

### In Vivo Screening of Combination Luciferase Modified mRNA

[1161] Balb-C mice (n=4) were subcutaneously injected with 200 ul of 100 ug of modified luciferase mRNA (mRNA sequence shown in SEQ ID NO: 409; polyA tail of approximately 160 nucleotides not shown in sequence; 5′cap, Cap1), fully modified with the chemical modifications outlined in Table 23, was formulated in 1×PBS. A control of PBS was also tested. The dosages of the modified luciferase mRNA is also outlined in Table 22. 8 hours after dosing the mice were imaged to determine luciferase expression. Twenty minutes prior to imaging, mice were injected intraperitoneally with a D-luciferin solution at 150 mg/kg. Animals were then anesthetized and images were acquired with an IVIS Lumina II imaging system (Perkin Elmer). Bioluminescence was measured as total flux (photons/second) of the entire mouse.

[1162] As demonstrated in Table 23, all luciferase mRNA modified chemistries (in combination) demonstrated in vivo activity. In addition the presence of N1-methylpseudouridine in the modified mRNA (with N4-acetylcytidine or 5 methylcytidine) demonstrated higher expression than when the same combinations where tested using with pseudouridine. Taken together, these data demonstrate that N1-methylpseudouridine containing luciferase mRNA results in improved protein expression in vivo whether used alone (Table 22) or when used in combination with other modified nucleotides (Table 23).

TABLE 23
Luciferase Screening Combinations

| | | Luciferase |
|---|---|---|
| | | expression |
| | | (photon/ |
| mRNA | Chemical Modifications | second) |
| Luciferase | N4-acetylcytidine/pseudouridine | 4.18E+06 |
| Luciferase | N4-acetylcytidine/N1-methylpseudouridine | 2.88E+07 |
| Luciferase | 5-methylcytidine/5-methoxyuridine | 3.48E+07 |
| Luciferase | 5-methylcytidine/5-methyluridine | 1.44E+07 |
| Luciferase | 5-methylcytidine/where 50% of the uridine is | 2.39E+06 |
| | replaced with 2-thiouridine | |
| Luciferase | 5-methylcytidine/pseudouridine | 2.36E+07 |
| Luciferase | 5-methylcytidine/N1-methyl-pseudouridine | 4.15E+07 |
| PBS | None | 3.59E+05 |

### Example 16

### 2′O-Methyl and 2′Fluoro Compounds

[1163] Luciferase mRNA (mRNA sequence shown in SEQ ID NO: 409; polyA tail of approximately 160 nucleotides not shown in sequence; 5′cap, Cap1) were produced as fully modified versions with the chemistries in Table 24 and transcribed using mutant T7 polymerase (Durascribe® T7 Transcription kit (Cat. No. DS010925) (Epicentre®, Madison, Wis.). 2′ fluoro-containing mRNA were made using Durascribe T7, however, 2′Omethyl-containing mRNA could not be transcribed using Durascribe T7.

[1164] Incorporation of 2′Omethyl modified mRNA might possibly be accomplished using other mutant T7 polymerases (Nat Biotechnol. (2004) 22:1155-1160; Nucleic Acids Res. (2002) 30:e138). Alternatively, 2′OMe modifications could be introduced post-transcriptionally using enzymatic means.

[1165] Introduction of modifications on the 2′ group of the sugar has many potential advantages. 2′OMe substitutions, like 2′ fluoro substitutions are known to protect against nucleases and also have been shown to abolish innate immune recognition when incorporated into other nucleic acids such as siRNA and anti-sense (incorporated in its entirety, Crooke, ed. Antisense Drug Technology, 2^{nd} edition; Boca Raton: CRC press).

[1166] The 2′Fluoro-modified mRNA were then transfected into HeLa cells to assess protein production in a cell context and the same mRNA were also assessed in a cell-free rabbit reticulocyte system. A control of unmodified luciferase (natural luciferase) was used for both transcription experiments, a control of untreated and mock transfected (Lipofectamine 2000 alone) were also analyzed for the HeLa transfection and a control of no RNA was analyzed for the rabbit reticulysates.

[1167] For the HeLa transfection experiments, the day before transfection, 20,000 HeLa cells (ATCC no. CCL-2; Manassas, Va.) were harvested by treatment with Trypsin-EDTA solution (LifeTechnologies, Grand Island, N.Y.) and seeded in a total volume of 100 ul EMEM medium (supplemented with 10% FCS and 1× Glutamax) per well in a 96-well cell culture plate (Corning, Manassas, Va.). The cells were grown at 37oG in 5% CO₂ atmosphere overnight. Next day, 83 ng of the 2′fluoro-containing luciferase modified RNA (mRNA sequence shown in SEQ ID NO: 409; polyA tail of approximately 160 nucleotides not shown in sequence; 5′cap, Cap1) with the chemical modification described in Table 24, were diluted in 10 ul final volume of OPTI-MEM (LifeTechnologies, Grand Island, N.Y.). Lipofectamine 2000 (LifeTechnologies, Grand Island, N.Y.) was used as transfection reagent and 0.2 ul were diluted in 10 ul final volume of OPTI-MEM. After 5 minutes of incubation at room temperature, both solutions were combined and incubated an additional 15 minute at room temperature. Then the 20 ul combined solution was added to the 100 ul cell culture medium containing the HeLa cells and incubated at room temperature. After 18 to 22 hours of incubation cells expressing luciferase were lysed with 100 ul of Passive Lysis Buffer (Promega, Madison, Wis.) according to manufacturer instructions. Aliquots of the lysates were transferred to white opaque polystyrene 96-well plates (Corning, Manassas, Va.) and combined with 100 ul complete luciferase assay solution (Promega, Madison, Wis.). The lysate volumes were adjusted or diluted until no more than 2 mio relative light units (RLU) per well were detected for the strongest signal producing samples and the RLUs for each chemistry tested are shown in Table 24. The plate reader was a BioTek Synergy H1 (BioTek, Winooski, Vt.). The background signal of the plates without reagent was about 200 relative light units per well.

[1168] For the rabbit reticulocyte lysate assay, 2′-fluoro-containing luciferase mRNA were diluted in sterile nuclease-free water to a final amount of 250 ng in 10 ul and added to 40 ul of freshly prepared Rabbit Reticulocyte Lysate and the in vitro translation reaction was done in a standard 1.5 mL polypropylene reaction tube (Thermo Fisher Scientific, Waltham, Mass.) at 30° C. in a dry heating block. The translation assay was done with the Rabbit Reticulocyte Lysate (nuclease-treated) kit (Promega, Madison, Wis.) according to the manufacturer's instructions. The reaction buffer was supplemented with a one-to-one blend of provided amino acid stock solutions devoid of either Leucine or Methionine resulting in a reaction mix containing sufficient amounts of both amino acids to allow effective in vitro translation. After 60 minutes of incubation, the reaction was stopped by placing the reaction tubes on ice.

[1169] Aliquots of the in vitro translation reaction containing luciferase modified RNA were transferred to white opaque polystyrene 96-well plates (Corning, Manassas, Va.) and combined with 100 ul complete luciferase assay solution (Promega, Madison, Wis.). The volumes of the in vitro translation reactions were adjusted or diluted until no more than 2 mio relative light units (RLUs) per well were detected for the strongest signal producing samples and the RLUs for each chemistry tested are shown in Tables 24 and 25. The plate reader was a BioTek Synergy H1 (BioTek, Winooski, Vt.). The background signal of the plates without reagent was about 160 relative light units per well.

[1170] As can be seen in Table 24 and 25, multiple 2′Fluoro-containing compounds are active in vitro and produce luciferase protein.

TABLE 24
HeLa Cells

| | Concentration | Volume | Yield | |
|---|---|---|---|---|
| Chemical Modification | (ug/ml) | (ul) | (ug) | RLU |
| 2′Fluoroadenosine | 381.96 | 500 | 190.98 | 388.5 |
| 2′Fluorocytosine | 654.56 | 500 | 327.28 | 2420 |
| 2′Fluoroguanine | 541,795 | 500 | 270.90 | 11,705.5 |
| 2′Flurorouridine | 944.005 | 500 | 472.00 | 6767.5 |
| Natural luciferase | N/A | N/A | N/A | 133,853.5 |
| Mock | N/A | N/A | N/A | 340 |
| Untreated | N/A | N/A | N/A | 238 |

TABLE 25
Rabbit Reticulysates

| Chemical Modification | RLU |
|---|---|
| 2′Fluoroadenosine | 162 |
| 2′Fluorocytosine | 208 |
| 2′Fluoroguanine | 371,509 |
| 2′Flurorouridine | 258 |
| Natural luciferase | 2,159,968 |
| No RNA | 156 |

### Example 17

### Luciferase in HeLa Cells Using a Combination of Modifications

[1171] To evaluate using of 2′fluoro-modified mRNA in combination with other modification a series of mRNA were transcribed using either wild-type T7 polymerase (non-fluoro-containing compounds) or using mutant T7 polymerases (fluyoro-containing compounds) as described in Example 86. All modified mRNA were tested by in vitro transfection in HeLa cells.

[1172] The day before transfection, 20,000 HeLa cells (ATCC no. CCL-2; Manassas, Va.) were harvested by treatment with Trypsin-EDTA solution (LifeTechnologies, Grand Island, N.Y.) and seeded in a total volume of 100 ul EMEM medium (supplemented with 10% FCS and 1× Glutamax) per well in a 96-well cell culture plate (Corning, Manassas, Va.). The cells were grown at 37oG in 5% CO₂ atmosphere overnight. Next day, 83 ng of Luciferase modified RNA (mRNA sequence shown in SEQ ID NO: 409; polyA tail of approximately 160 nucleotides not shown in sequence; 5′cap, Cap1) with the chemical modification described in Table 44, were diluted in 10 ul final volume of OPTI-MEM (LifeTechnologies, Grand Island, N.Y.). Lipofectamine 2000 (LifeTechnologies, Grand Island, N.Y.) was used as transfection reagent and 0.2 ul were diluted in 10 ul final volume of OPTI-MEM. After 5 minutes of incubation at room temperature, both solutions were combined and incubated an additional 15 minute at room temperature. Then the 20 ul combined solution was added to the 100 ul cell culture medium containing the HeLa cells and incubated at room temperature.

[1173] After 18 to 22 hours of incubation cells expressing luciferase were lysed with 100 ul of Passive Lysis Buffer (Promega, Madison, Wis.) according to manufacturer instructions. Aliquots of the lysates were transferred to white opaque polystyrene 96-well plates (Corning, Manassas, Va.) and combined with 100 ul complete luciferase assay solution (Promega, Madison, Wis.). The lysate volumes were adjusted or diluted until no more than 2 mio relative light units (RLU) per well were detected for the strongest signal producing samples and the RLUs for each chemistry tested are shown in Table 26. The plate reader was a BioTek Synergy H1 (BioTek, Winooski, Vt.). The background signal of the plates without reagent was about 200 relative light units per well.

[1174] As evidenced in Table 26, most combinations of modifications resulted in mRNA which produced functional luciferase protein, including all the non-flouro containing compounds and many of the combinations containing 2′fluro modifications.

TABLE 26
Luciferase

| Chemical Modification | RLU |
|---|---|
| N4-acetylcytidine/pseudouridine | 113,796 |
| N4-acetylcytidine/N1-methylpseudouridine | 316,326 |
| 5-methylcytidine/5-methoxyuridine | 24,948 |
| 5-methylcytidine/5-methyluridine | 43,675 |
| 5-methylcytidine/half of the uridines modified with 50% | 41,601 |
| 2-thiouridine | |
| 5-methylcytidine/2-thiouridine | 1,102 |
| 5-methylcytidine/pseudouridine | 51,035 |
| 5-methylcytidine/N1 methyl pseudouridine | 152,151 |
| N4-acetylcytidine/2′Fluorouridine triphosphate | 288 |
| 5-methylcytidine/2′Fluorouridine triphosphate | 269 |
| 2′Fluorocytosine triphosphate/pseudouridine | 260 |
| 2′Fluorocytosine triphosphate/N1-methylpseudouridine | 412 |
| 2′Fluorocytosine triphosphate/2-thiouridine | 427 |
| 2′Fluorocytosine triphosphate/5-bromouridine | 253 |
| 2′Fluorocytosine triphosphate/2′Fluorouridine triphosphate | 184 |
| 2′Fluoroguanine triphosphate/5-methylcytidine | 321 |
| 2′Fluoroguanine triphosphate/5-methylcytidine/Pseudouridine | 207 |
| 2′Fluoroguanine/5-methylcytidine/N1 methylpsuedouridine | 235 |
| 2′Fluoroguanine/pseudouridine | 218 |
| 2′Fluoroguanine/N1-methylpsuedouridine | 247 |
| 5-methylcytidine/pseudouridine, test A | 13,833 |
| 5-methylcytidine/N-methylpseudouridine, test A | 598 |
| 2′Fluorocytosine triphosphate | 201 |
| 2′Fluorouridine triphosphate | 305 |
| 5-methylcytidine/pseudouridine, test B | 115,401 |
| 5-methylcytidine/N-methylpseudouridine, test B | 21,034 |
| Natural luciferase | 30,801 |
| Untreated | 344 |
| Mock | 262 |

### Example 18

### G-CSF In Vitro Transcription

[1175] To assess the activity of all our different chemical modifications in the context of a second open reading frame, we replicated experiments previously conducted using luciferase mRNA, with human G-CSF mRNA. G-CSF mRNA (mRNA sequence shown in SEQ ID NO: 408; polyA tail of approximately 160 nucleotides not shown in sequence; 5′cap, Cap1) were fully modified with the chemistries in Tables 27 and 28 using wild-type T7 polymerase (for all non-fluoro-containing compounds) or mutant T7 polymerase (for all fluoro-containing compounds). The mutant T7 polymerase was obtained commercially (Durascribe® T7 Transcription kit (Cat. No. DS010925) (Epicentre®, Madison, Wis.).

[1176] The modified RNA in Tables 27 and 28 were transfected in vitro in HeLa cells or added to rabbit reticulysates (250 ng of modified mRNA) as indicated. A control of untreated, mock transfected (transfection reagent alone), G-CSF fully modified with 5-methylcytosine and N1-methylpseudouridine or luciferase control (mRNA sequence shown in SEQ ID NO: 409; polyA tail of approximately 160 nucleotides not shown in sequence; 5′cap, Cap1) fully modified with 5-methylcytosine and N1-methylpseudouridine were also analyzed. The expression of G-CSF protein was determined by ELISA and the values are shown in Tables 27 and 28. In Table 27, “NT” means not tested.

[1177] As shown in Table 27, many, but not all, chemical modifications resulted in human G-CSF protein production. These results from cell-based and cell-free translation systems correlate very nicely with the same modifications generally working or not working in both systems. One notable exception is 5-formylcytidine modified G-CSF mRNA which worked in the cell-free translation system, but not in the HeLa cell-based transfection system. A similar difference between the two assays was also seen with 5-formylcytidine modified luciferase mRNA.

[1178] As demonstrated in Table 28, many, but not all, G-CSF mRNA modified chemistries (when used in combination) demonstrated in vivo activity. In addition the presence of N1-methylpseudouridine in the modified mRNA (with N4-acetylcytidine or 5 methylcytidine) demonstrated higher expression than when the same combinations where tested using with pseudouridine. Taken together, these data demonstrate that N1-methylpseudouridine containing G-CSF mRNA results in improved protein expression in vitro.

TABLE 27
G-CSF Expression

| | | G-CSF |
|---|---|---|
| | | protein |
| | G-CSF | (pg/ml) |
| | protein | Rabbit |
| | (pg/ml) | reticulysates |
| Chemical Modification | HeLa cells | cells |
| Pseudouridine | 1,150,909 | 147,875 |
| 5-methyluridine | 347,045 | 147,250 |
| 2-thiouridine | 417,273 | 18,375 |
| N1-methylpseudouridine | NT | 230,000 |
| 4-thiouridine | 107,273 | 52,375 |
| 5-methoxyuridine | 1,715,909 | 201,750 |
| 5-methylcytosine/pseudouridine, Test A | 609,545 | 119,750 |
| 5-methylcytosine/N1-methylpseudouridine, | 1,534,318 | 110,500 |
| Test A | | |
| 2′-Fluoro-guanosine | 11,818 | 0 |
| 2′-Fluoro-uridine | 60,455 | 0 |
| 5-methylcytosine/pseudouridine, Test B | 358,182 | 57,875 |
| 5-methylcytosine/N1-methylpseudouridine, | 1,568,636 | 76,750 |
| Test B | | |
| 5-Bromo-uridine | 186,591 | 72,000 |
| 5-(2carbomethoxyvinyl) uridine | 1,364 | 0 |
| 5-[3(1-E-propenylamino) uridine | 27,955 | 32,625 |
| α-thio-cytidine | 120,455 | 42,625 |
| 5-methylcytosine/pseudouridine, Test C | 882,500 | 49,250 |
| N1-methyl-adenosine | 4,773 | 0 |
| N6-methyl-adenosine | 1,591 | 0 |
| 5-methyl-cytidine | 646,591 | 79,375 |
| N4-acetylcytidine | 39,545 | 8,000 |
| 5-formyl-cytidine | 0 | 24,000 |
| 5-methylcytosine/pseudouridine, Test D | 87,045 | 47,750 |
| 5-methylcytosine/N1-methylpseudouridine, | 1,168,864 | 97,125 |
| Test D | | |
| Mock | 909 | 682 |
| Untreated | 0 | 0 |
| 5-methylcytosine/N1-methylpseudouridine, | 1,106,591 | NT |
| Control | | |
| Luciferase control | NT | 0 |

TABLE 28
Combination Chemistries in HeLa cells

| | G-CSF protein |
|---|---|
| | (pg/ml) |
| Chemical Modification | HeLa cells |
| N4-acetylcytidine/pseudouridine | 537,273 |
| N4-acetylcytidine/N1-methylpseudouridine | 1,091,818 |
| 5-methylcytidine/5-methoxyuridine | 516,136 |
| 5-methylcytidine/5-bromouridine | 48,864 |
| 5-methylcytidine/5-methyluridine | 207,500 |
| 5-methylcytidine/2-thiouridine | 33,409 |
| N4-acetylcytidine/5-bromouridine | 211,591 |
| N4-acetylcytidine/2-thiouridine | 46,136 |
| 5-methylcytosine/pseudouridine | 301,364 |
| 5-methylcytosine/N1-methylpseudouridine | 1,017,727 |
| N4-acetylcytidine/2′Fluorouridine triphosphate | 62,273 |
| 5-methylcytidine/2′Fluorouridine triphosphate | 49,318 |
| 2′Fluorocytosine triphosphate/pseudouridine | 7,955 |
| 2′Fluorocytosine triphosphate/N1-methylpseudouridine | 1,364 |
| 2′Fluorocytosine triphosphate/2-thiouridine | 0 |
| 2′Fluorocytosine triphosphate/5-bromouridine | 1,818 |
| 2′Fluorocytosine triphosphate/2′Fluorouridine | 909 |
| triphosphate | |
| 2′Fluoroguanine triphosphate/5-methylcytidine | 0 |
| 2′Fluoroguanine triphosphate/5-methylcytidine/ | 0 |
| pseudouridine | |
| 2′Fluoroguanine triphosphate/5-methylcytidine/N1 | 1,818 |
| methylpseudouridine | |
| 2′Fluoroguanine triphosphate/pseudouridine | 1,136 |
| 2′Fluoroguanine triphosphate/2′Fluorocytosine | 0 |
| triphosphate/N1-methylpseudouridine | |
| 5-methylcytidine/pseudouridine | 617,727 |
| 5-methylcytidine/N1-methylpseudouridine | 747,045 |
| 5-methylcytidine/pseudouridine | 475,455 |
| 5-methylcytidine/N1-methylpseudouridine | 689,091 |
| 5-methylcytosine/N1-methylpseudouridine, Control 1 | 848,409 |
| 5-methylcytosine/N1-methylpseudouridine, Control 2 | 581,818 |
| Mock | 682 |
| Untreated | 0 |
| Luciferase 2′Fluorocytosine triphosphate | 0 |
| Luciferase 2′Fluorouridine triphosphate | 0 |

### Example 19

### Screening of Chemistries

[1179] The tables listed in below (Tables 29-31) summarize much of the in vitro and in vitro screening data with the different compounds presented in the previous examples. A good correlation exists between cell-based and cell-free translation assays. The same chemistry substitutions generally show good concordance whether tested in the context of luciferase or G-CSF mRNA. Lastly, N1-methylpseudouridine containing mRNA show a very high level of protein expression with little to no detectable cytokine stimulation in vitro and in vivo, and is superior to mRNA containing pseudouridine both in vitro and in vivo.

[1180] Luciferase mRNA (mRNA sequence shown in SEQ ID NO: 409; polyA tail of approximately 160 nucleotides not shown in sequence; 5′cap, Cap1) and G-CSF mRNA (mRNA sequence shown in SEQ ID NO: 408; polyA tail of approximately 160 nucleotides not shown in sequence; 5′cap, Cap1) were modified with naturally and non-naturally occurring chemistries described in Tables 29 and 30 or combination chemistries described in Table 30 and tested using methods described herein.

[1181] In Tables 29 and 30, “*” refers to in vitro transcription reaction using a mutant T7 polymerase (Durascribe® T7 Transcription kit (Cat. No. DS010925) (Epicentre®, Madison, Wis.); “**” refers to the second result in vitro transcription reaction using a mutant T7 polymerase (Durascribe® T7 Transcription kit (Cat. No. DS010925) (Epicentre®, Madison, Wis.); “***” refers to production seen in cell free translations (rabbit reticulocyte lysates); the protein production of HeLa is judged by “+,” “+/−” and “−”; when referring to G-CSF PBMC “++++” means greater than 6,000 pg/ml G-CSF, “+++” means greater than 3,000 pg/ml G-CSF, “++” means greater than 1,500 pg/ml G-CSF, “+” means greater than 300 pg/ml G-CSF, “+/−” means 150-300 pg/ml G-CSF and the background was about 110 pg/ml; when referring to cytokine PBMC “++++” means greater than 1,000 pg/ml interferon-alpha (IFN-alpha), “+++” means greater than 600 pg/ml IFN-alpha, “++” means greater than 300 pg/ml IFN-alpha, “+” means greater than 100 pg/ml IFN-alpha, “−” means less than 100 pg/ml and the background was about 70 pg/ml; and “NT” means not tested. In Table 30, the protein production was evaluated using a mutant T7 polymerase (Durascribe® T7 Transcription kit (Cat. No. DS010925) (Epicentre®, Madison, Wis.).

TABLE 29
Naturally Occurring

| | | | Protein | Protein | Protein | Cytokines | In Vivo | In Vivo |
|---|---|---|---|---|---|---|---|---|
| Common Name | IVT | IVT | (Luc; | (G-CSF; | (G-CSF; | (G-CSF; | Protein | Protein |
| (symbol) | (Luc) | (G-CSF) | HeLa) | HeLa) | PBMC) | PBMC) | (Luc) | (G-CSF) |
| 1-methyladenosine | Fail | Pass | NT | − | +/− | ++ | NT | NT |
| (m¹A) | | | | | | | | |
| N⁶-methyladenosine | Pass | Pass | − | − | +/− | ++++ | NT | NT |
| (OA) | | | | | | | | |
| 2′-O-methyladeno- | Fail* | Not | NT | NT | NT | NT | NT | NT |
| sine (Am) | | Done | | | | | | |
| 5-methylcytidine | Pass | Pass | + | + | + | ++ | + | NT |
| (m⁵C) | | | | | | | | |
| 2′-O-methylcytidine | Fail* | Not | NT | NT | NT | NT | NT | NT |
| (Cm) | | Done | | | | | | |
| 2-thiocytidine (s²C) | Fail | Fail | NT | NT | NT | NT | NT | NT |
| N⁴-acetylcytidine | Pass | Pass | + | + | +/− | +++ | + | NT |
| (ac⁴C) | | | | | | | | |
| 5-formylcytidine | Pass | Pass | −*** | −*** | − | + | NT | NT |
| (f⁵C) | | | | | | | | |
| 2′-O-methylguano- | Fail* | Not | NT | NT | NT | NT | NT | NT |
| sine (Gm) | | Done | | | | | | |
| inosine (I) | Fail | Fail | NT | NT | NT | NT | NT | NT |
| pseudouridine (Y) | Pass | Pass | + | + | ++ | + | + | NT |
| 5-methyluridine | Pass | Pass | + | + | +/− | + | NT | NT |
| (m⁵U) | | | | | | | | |
| 2′-O-methyluridine | Fail* | Not | NT | NT | NT | NT | NT | NT |
| (Um) | | Done | | | | | | |
| 1-methylpseudouri- | Pass | Pass | + | Not | ++++ | − | + | NT |
| dine (m¹Y) | | | | Done | | | | |
| 2-thiouridine (s²U) | Pass | Pass | − | + | + | + | NT | NT |
| 4-thiouridine (s⁴U) | Fail | Pass | | + | +/− | ++ | NT | NT |
| 5-methoxyuridine | Pass | Pass | + | + | ++ | − | + | NT |
| (mo⁵U) | | | | | | | | |
| 3-methyluridine | Fail | Fail | NT | NT | NT | NT | NT | NT |
| (m³U) | | | | | | | | |

TABLE 30
Non-Naturally Occurring

| | | | Protein | Protein | Protein | Cytokines | In Vivo | In Vivo |
|---|---|---|---|---|---|---|---|---|
| | IVT | IVT | (Luc; | (G-CSF; | (G-CSF; | (G-CSF; | Protein | Protein |
| Common Name | (Luc) | (G-CSF) | HeLa) | HeLa) | PBMC) | PBMC) | (Luc) | (G-CSF) |
| 2′-F-ara- | Fail | Fail | NT | NT | NT | NT | NT | NT |
| guanosine | | | | | | | | |
| 2′-F-ara- | Fail | Fail | NT | NT | NT | NT | NT | NT |
| adenosine | | | | | | | | |
| 2′-F-ara- | Fail | Fail | NT | NT | NT | NT | NT | NT |
| cytidine | | | | | | | | |
| 2′-F-ara-uridine | Fail | Fail | NT | NT | NT | NT | NT | NT |
| 2′-F-guanosine | Fail/ | Pass/ | +** | +/− | − | + | + | NT |
| | Pass** | Fail** | | | | | | |
| 2′-F-adenosine | Fail/ | Fail/ | −** | NT | NT | NT | NT | NT |
| | Pass** | Fail** | | | | | | |
| 2′-F-cytidine | Fail/ | Fail/ | +** | NT | NT | NT | + | NT |
| | Pass** | Pass** | | | | | | |
| 2′-F-uridine | Fail/ | Pass/ | +** | + | +/− | + | − | NT |
| | Pass** | Pass** | | | | | | |
| 2′-OH-ara- | Fail | Fail | NT | NT | NT | NT | NT | NT |
| guanosine | | | | | | | | |
| 2′-OH-ara- | Not | Not | NT | NT | NT | NT | NT | NT |
| adenosine | Done | Done | | | | | | |
| 2′-OH-ara- | Fail | Fail | NT | NT | NT | NT | NT | NT |
| cytidine | | | | | | | | |
| 2′-OH-ara- | Fail | Fail | NT | NT | NT | NT | NT | NT |
| uridine | | | | | | | | |
| 5-Br-Uridine | Pass | Pass | + | + | + | + | + | |
| 5-(2-carbo- | Pass | Pass | − | − | +/− | − | | |
| methoxyvinyl) | | | | | | | | |
| Uridine | | | | | | | | |
| 5 -[3-(1-E- | Pass | Pass | − | + | + | − | | |
| Propenylamino) | | | | | | | | |
| Uridine (aka | | | | | | | | |
| Chem 5) | | | | | | | | |
| N6-(19-Amino- | Fail | Fail | NT | NT | NT | NT | NT | NT |
| pentaoxanon- | | | | | | | | |
| adecyl) A | | | | | | | | |
| 2-Dimethyl- | Fail | Fail | NT | NT | NT | NT | NT | NT |
| amino guanosine | | | | | | | | |
| 6-Aza-cytidine | Fail | Fail | NT | NT | NT | NT | NT | NT |
| a-Thio-cytidine | Pass | Pass | + | + | +/− | +++ | NT | NT |
| Pseudo- | NT | NT | NT | NT | NT | NT | NT | NT |
| isocytidine | | | | | | | | |
| 5-Iodo-uridine | NT | NT | NT | NT | NT | NT | NT | NT |
| a-Thio-uridine | NT | NT | NT | NT | NT | NT | NT | NT |
| 6-Aza-uridine | NT | NT | NT | NT | NT | NT | NT | NT |
| Deoxy-thymidine | NT | NT | NT | NT | NT | NT | NT | NT |
| a-Thio guanosine | NT | NT | NT | NT | NT | NT | NT | NT |
| 8-Oxo-guanosine | NT | NT | NT | NT | NT | NT | NT | NT |
| O6-Methyl- | NT | NT | NT | NT | NT | NT | NT | NT |
| guanosine | | | | | | | | |
| 7-Deaza- | NT | NT | NT | NT | NT | NT | NT | NT |
| guanosine | | | | | | | | |
| 6-Chloro-purine | NT | NT | NT | NT | NT | NT | NT | NT |
| a-Thio-adenosine | NT | NT | NT | NT | NT | NT | NT | NT |
| 7-Deaza- | NT | NT | NT | NT | NT | NT | NT | NT |
| adenosine | | | | | | | | |
| 5-iodo-cytidine | NT | NT | NT | NT | NT | NT | NT | NT |

[1182] In Table 31, the protein production of HeLa is judged by “+,” “+/−” and “−”; when referring to G-CSF PBMC “++++” means greater than 6,000 pg/ml G-CSF, “+++” means greater than 3,000 pg/ml G-CSF, “++” means greater than 1,500 pg/ml G-CSF, “+” means greater than 300 pg/ml G-CSF, “+/−” means 150-300 pg/ml G-CSF and the background was about 110 pg/ml; when referring to cytokine PBMC “++++” means greater than 1,000 pg/ml interferon-alpha (IFN-alpha), “+++” means greater than 600 pg/ml IFN-alpha, “++” means greater than 300 pg/ml IFN-alpha, “+” means greater than 100 pg/ml IFN-alpha, “−” means less than 100 pg/ml and the background was about 70 pg/ml; “WT” refers to the wild type T7 polymerase, “MT” refers to mutant T7 polymerase (Durascribe® T7 Transcription kit (Cat. No. DS010925) (Epicentre®, Madison, Wis.) and “NT” means not tested.

TABLE 31
Combination Chemistry

| | | | | | Protein | Protein | Protein | Cytokines | In Vivo |
|---|---|---|---|---|---|---|---|---|---|
| | | | IVT | IVT | (Luc; | (G-CSF; | (G-CSF; | (G-CSF; | Protein |
| Cytidine analog | Uridine analog | Purine | Luc | (G-CSF) | HeLa) | HeLa) | PBMC) | PBMC) | (Luc) |
| N4-acetylcyti- | pseudouridine | AG | Pass | Pass | + | + | NT | NT | + |
| dine | | | WT | WT | | | | | |
| N4-acetylcyti- | N1-methyl- | A,G | Pass | Pass | + | + | NT | NT | + |
| dine | pseudouridine | | WT | WT | | | | | |
| 5-methylcyti- | 5-methoxyuri- | A,G | Pass | Pass | + | + | NT | NT | + |
| dine | dine | | WT | WT | | | | | |
| 5-methylcyti- | 5-bromouri- | A,G | Pass | Pass | Not | + | NT | NT | |
| dine | dine | | WT | WT | Done | | | | |
| 5-methylcyti- | 5-methyluri- | A,G | Pass | Pass | + | + | NT | NT | + |
| dine | dine | | WT | WT | | | | | |
| 5-methylcyti- | 50% 2- | A,G | Pass | Pass | + | NT | NT | NT | + |
| dine | thiouridine; | | WT | WT | | | | | |
| | 50% uridine | | | | | | | | |
| 5-methylcyti- | 100% 2- | A,G | Pass | Pass | − | + | NT | NT | |
| dine | thiouridine | | WT | WT | | | | | |
| 5-methylcyti- | pseudouridine | A,G | Pass | Pass | + | + | ++ | + | + |
| dine | | | WT | WT | | | | | |
| 5-methylcyti- | N1-methyl- | A,G | Pass | Pass | + | + | ++++ | − | + |
| dine | pseudouridine | | WT | WT | | | | | |
| N4-acetylcyti- | 2-thiouridine | A,G | Not | Pass | Not | + | NT | NT | NT |
| dine | | | Done | WT | Done | | | | |
| N4-acetylcyti- | 5-bromouri- | A,G | Not | Pass | Not | + | NT | NT | NT |
| dine | dine | | Done | WT | Done | | | | |
| N4-acetylcyti- | 2 Fluorouridine | A,G | Pass | Pass | − | + | NT | NT | NT |
| dine | triphosphate | | | | | | | | |
| 5-methylcyti- | 2 Fluorouridine | A,G | Pass | Pass | − | + | NT | NT | NT |
| dine | triphosphate | | | | | | | | |
| 2 Fluorocytosine | pseudouridine | A,G | Pass | Pass | − | + | NT | NT | NT |
| triphosphate | | | | | | | | | |
| 2 Fluorocytosine | N1-methyl- | A,G | Pass | Pass | − | +/− | NT | NT | NT |
| triphosphate | pseudouridine | | | | | | | | |
| 2 Fluorocytosine | 2-thiouridine | A,G | Pass | Pass | − | − | NT | NT | NT |
| triphosphate | | | | | | | | | |
| 2 Fluorocytosine | 5-bromouri- | A,G | Pass | Pass | − | +/− | NT | NT | NT |
| triphosphate | dine | | | | | | | | |
| 2 Fluorocytosine | 2 Fluorouridine | A,G | Pass | Pass | − | +/− | NT | NT | NT |
| triphosphate | triphosphate | | | | | | | | |
| 5-methylcyti- | uridine | A,2 | Pass | Pass | − | − | NT | NT | NT |
| dine | | Fluoro | | | | | | | |
| | | GTP | | | | | | | |
| 5-methylcyti- | pseudouridine | A,2 | Pass | Pass | − | − | NT | NT | NT |
| dine | | Fluoro | | | | | | | |
| | | GTP | | | | | | | |
| 5-methylcyti- | N1-methyl- | A,2 | Pass | Pass | − | +/− | NT | NT | NT |
| dine | pseudouridine | Fluoro | | | | | | | |
| | | GTP | | | | | | | |
| 2 Fluorocytosine | pseudouridine | A,2 | Pass | Pass | − | +/− | NT | NT | NT |
| triphosphate | | Fluoro | | | | | | | |
| | | GTP | | | | | | | |
| 2 Fluorocytosine | N1-methyl- | A,2 | Pass | Pass | − | − | NT | NT | NT |
| triphosphate | pseudouridine | Fluoro | | | | | | | |
| | | GTP | | | | | | | |

### Example 20

### 2′Fluoro Chemistries in PBMC

[1183] The ability of G-CSF modified mRNA (mRNA sequence shown in SEQ ID NO: 408; polyA tail of approximately 160 nucleotides not shown in sequence; 5′cap, Cap1) to trigger innate an immune response was determined by measuring interferon-alpha (IFN-alpha) and tumor necrosis factor-alpha (TNF-alpha) production. Use of in vitro PBMC cultures is an accepted way to measure the immunostimulatory potential of oligonucleotides (Robbins et al., Oligonucleotides 2009 19:89-102) and transfection methods are described herein. Shown in Table 32 are the average from 2 or 3 separate PBMC donors of the interferon-alpha (IFN-alpha) and tumor necrosis factor alpha (TNF-alpha) production over time as measured by specific ELISA. Controls of R848, P(I)P(C), LPS and Lipofectamine 2000 (L2000) were also analyzed.

[1184] With regards to innate immune recognition, while both modified mRNA chemistries largely prevented IFN-alpha and TNF-alpha production relative to positive controls (R848, P(I)P(C)), 2′fluoro compounds reduce IFN-alpha and TNF-alpha production even lower than other combinations and N4-acetylcytidine combinations raised the cytokine profile.

TABLE 32
IFN-alpha and TNF-alpha

| | IFN-alpha: | TNF-alpha: |
|---|---|---|
| | 3 Donor | 2 Donor |
| | Average | Average |
| | (pg/ml) | (pg/ml) |
| L2000 | 1 | 361 |
| P(I)P(C) | 482 | 544 |
| R848 | 45 | 8,235 |
| LPS | 0 | 6,889 |
| N4-acetylcytidine/pseudouridine | 694 | 528 |
| N4-acetylcytidine/N1-methylpseudouridine | 307 | 283 |
| 5-methylcytidine/5-methoxyuridine | 0 | 411 |
| 5-methylcytidine/5-bromouridine | 0 | 270 |
| 5-methylcytidine/5-methyluridine | 456 | 428 |
| 5-methylcytidine/2-thiouridine | 274 | 277 |
| N4-acetylcytidine/2-thiouridine | 0 | 285 |
| N4-acetylcytidine/5-bromouridine | 44 | 403 |
| 5-methylcytidine/pseudouridine | 73 | 332 |
| 5-methylcytidine/N1-methylpseudouridine | 31 | 280 |
| N4-acetylcytidine/2′fluorouridine triphosphate | 35 | 32 |
| 5-methylcytodine/2′fluorouridine triphosphate | 24 | 0 |
| 2′fluorocytidine triphosphate/N1- | 0 | 11 |
| methylpseudouridine | | |
| 2′fluorocytidine triphosphate/2-thiouridine | 0 | 0 |
| 2′fluorocytidine/triphosphate5-bromouridine | 12 | 2 |
| 2vfluorocytidine triphosphate/2′fluorouridine | 11 | 0 |
| triphosphate | | |
| 2′fluorocytidine triphosphate/5-methylcytidine | 14 | 23 |
| 2′fluorocytidine triphosphate/5- | 6 | 21 |
| methylcytidine/pseudouridine | | |
| 2′fluorocytidine triphosphate/5- | 3 | 15 |
| methylcytidine/N1-methylpseudouridine | | |
| 2′fluorocytidine triphosphate/pseudouridine | 0 | 4 |
| 2′fluorocytidine triphosphate/N1- | 6 | 20 |
| methylpseudouridine | | |
| 5-methylcytidine/pseudouridine | 82 | 18 |
| 5-methylcytidien/N1-methylpseudouridine | 35 | 3 |

### Example 21

### Directed SAR of Pseudouridine and N1-Methyl PseudoUridine

[1185] With the recent focus on the pyrimidine nucleoside pseudouridine, a series of structure-activity studies were designed to investigate mRNA containing modifications to pseudouridine or N1-methyl-pseudourdine and their effects on reprogramming.

[1186] The study was designed to explore the effect of chain length, increased lipophilicity, presence of ring structures, and alteration of hydrophobic or hydrophilic interactions when modifications were made at the N1 position, C6 position, the 2-position, the 4-position and on the phosphate backbone. Stability is also investigated.

[1187] To this end, modifications involving alkylation, cycloalkylation, alkyl-cycloalkylation, arylation, alkyl-arylation, alkylation moieties with amino groups, alkylation moieties with carboxylic acid groups, and alkylation moieties containing amino acid charged moieties are investigated. The degree of alkylation is generally C₁-C₆. Examples of the chemistry modifications include those listed in Table 33.

TABLE 33
Pseudouridine and N1-methyl Pseudo Uridine SAR

| | Compound | Naturally |
|---|---|---|
| Chemistry Modification | # | occuring |
| N1-Modifications | | |
| N1-Ethyl-pseudo-UTP | 1 | N |
| N1-Propyl-pseudo-UTP | 2 | N |
| N1-iso-propyl-pseudo-UTP | 3 | N |
| N1-(2,2,2-Trifluoroethyl)-pseudo-UTP | 4 | N |
| N1-Cyclopropyl-pseudo-UTP | 5 | N |
| N1-Cyclopropylmethyl-pseudo-UTP | 6 | N |
| N1-Phenyl-pseudo-UTP | 7 | N |
| N1-Benzyl-pseudo-UTP | 8 | N |
| N1-Aminomethyl-pseudo-UTP | 9 | N |
| Pseudo-UTP-N1-2-ethanoic acid | 10 | N |
| N1-(3-Amino-3-carboxypropyl)pseudo-UTP | 11 | N |
| N1-Methyl-3-(3-amino-3-carboxypropyl) | 12 | Y |
| pseudo-UTP | | |
| C-6 Modifications | | |
| 6-Methyl-pseudo-UTP | 13 | N |
| 6-Trifluoromethyl-pseudo-UTP | 14 | N |
| 6-Methoxy-pseudo-UTP | 15 | N |
| 6-Phenyl-pseudo-UTP | 16 | N |
| 6-Iodo-pseudo-UTP | 17 | N |
| 6-Bromo-pseudo-UTP | 18 | N |
| 6-Chloro-pseudo-UTP | 19 | N |
| 6-Fluoro-pseudo-UTP | 20 | N |
| 2- or 4-position Modifications | | |
| 4-Thio-pseudo-UTP | 21 | N |
| 2-Thio-pseudo-UTP | 22 | N |
| Phosphate backbone Modifications | | |
| Alpha-thio-pseudo-UTP | 23 | N |
| N1-Me-alpha-thio-pseudo-UTP | 24 | N |

TABLE 34
Pseudouridine and N1-methyl Pseudo Uridine SAR

| | Compound | Naturally |
|---|---|---|
| Chemistry Modification | # | occuring |
| N1-Methyl-pseudo-UTP | 1 | Y |
| N1-Butyl-pseudo-UTP | 2 | N |
| N1-tert-Butyl-pseudo-UTP | 3 | N |
| N1-Pentyl-pseudo-UTP | 4 | N |
| N1-Hexyl-pseudo-UTP | 5 | N |
| N1-Trifluoromethyl-pseudo-UTP | 6 | Y |
| N1-Cyclobutyl-pseudo-UTP | 7 | N |
| N1-Cyclopentyl-pseudo-UTP | 8 | N |
| N1-Cyclohexyl-pseudo-UTP | 9 | N |
| N1-Cycloheptyl-pseudo-UTP | 10 | N |
| N1-Cyclooctyl-pseudo-UTP | 11 | N |
| N1-Cyclobutylmethyl-pseudo-UTP | 12 | N |
| N1-Cyclopentylmethyl-pseudo-UTP | 13 | N |
| N1-Cyclohexylmethyl-pseudo-UTP | 14 | N |
| N1-Cycloheptylmethyl-pseudo-UTP | 15 | N |
| N1-Cyclooctylmethyl-pseudo-UTP | 16 | N |
| N1-p-tolyl-pseudo-UTP | 17 | N |
| N1-(2,4,6-Trimethyl-phenyl)pseudo-UTP | 18 | N |
| N1-(4-Methoxy-phenyl)pseudo-UTP | 19 | N |
| N1-(4-Amino-phenyl)pseudo-UTP | 20 | N |
| N1(4-Nitro-phenyl)pseudo-UTP | 21 | N |
| Pseudo-UTP-N1-p-benzoic acid | 22 | N |
| N1-(4-Methyl-benzyl)pseudo-UTP | 24 | N |
| N1-(2,4,6-Trimethyl-benzyl)pseudo-UTP | 23 | N |
| N1-(4-Methoxy-benzyl)pseudo-UTP | 25 | N |
| N1-(4-Amino-benzyl)pseudo-UTP | 26 | N |
| N1-(4-Nitro-benzyl)pseudo-UTP | 27 | N |
| Pseudo-UTP-N1-methyl-p-benzoic acid | 28 | N |
| N1-(2-Amino-ethyl)pseudo-UTP | 29 | N |
| N1-(3-Amino-propyl)pseudo-UTP | 30 | N |
| N1-(4-Amino-butyl)pseudo-UTP | 31 | N |
| N1-(5-Amino-pentyl)pseudo-UTP | 32 | N |
| N1-(6-Amino-hexyl)pseudo-UTP | 33 | N |
| Pseudo-UTP-N1-3-propionic acid | 34 | N |
| Pseudo-UTP-N1-4-butanoic acid | 35 | N |
| Pseudo-UTP-N1-5-pentanoic acid | 36 | N |
| Pseudo-UTP-N1-6-hexanoic acid | 37 | N |
| Pseudo-UTP-N1-7-heptanoic acid | 38 | N |
| N1-(2-Amino-2-carboxyethyl)pseudo-UTP | 39 | N |
| N1-(4-Amino-4-carboxybutyl)pseudo-UTP | 40 | N |
| N3-Alkyl-pseudo-UTP | 41 | N |
| 6-Ethyl-pseudo-UTP | 42 | N |
| 6-Propyl-pseudo-UTP | 43 | N |
| 6-iso-Propyl-pseudo-UTP | 44 | N |
| 6-Butyl-pseudo-UTP | 45 | N |
| 6-tert-Butyl-pseudo-UTP | 46 | N |
| 6-(2,2,2-Trifluoroethyl)-pseudo-UTP | 47 | N |
| 6-Ethoxy-pseudo-UTP | 48 | N |
| 6-Trifluoromethoxy-pseudo-UTP | 49 | N |
| 6-Phenyl-pseudo-UTP | 50 | N |
| 6-(Substituted-Phenyl)-pseudo-UTP | 51 | N |
| 6-Cyano-pseudo-UTP | 52 | N |
| 6-Azido-pseudo-UTP | 53 | N |
| 6-Amino-pseudo-UTP | 54 | N |
| 6-Ethylcarboxylate-pseudo-UTP | 54b | N |
| 6-Hydroxy-pseudo-UTP | 55 | N |
| 6-Methylamino-pseudo-UTP | 55b | N |
| 6-Dimethylamino-pseudo-UTP | 57 | N |
| 6-Hydroxyamino-pseudo-UTP | 59 | N |
| 6-Formyl-pseudo-UTP | 60 | N |
| 6-(4-Morpholino)-pseudo-UTP | 61 | N |
| 6-(4-Thiomorpholino)-pseudo-UTP | 62 | N |
| N1-Me-4-thio-pseudo-UTP | 63 | N |
| N1-Me-2-thio-pseudo-UTP | 64 | N |
| 1,6-Dimethyl-pseudo-UTP | 65 | N |
| 1-Methyl-6-trifluoromethyl-pseudo-UTP | 66 | N |
| 1-Methyl-6-ethyl-pseudo-UTP | 67 | N |
| 1-Methyl-6-propyl-pseudo-UTP | 68 | N |
| 1-Methyl-6-iso-propyl-pseudo-UTP | 69 | N |
| 1-Methyl-6-butyl-pseudo-UTP | 70 | N |
| 1-Methyl-6-tert-butyl-pseudo-UTP | 71 | N |
| 1-Methyl-6-(2,2,2-Trifluoroethyl)pseudo-UTP | 72 | N |
| 1-Methyl-6-iodo-pseudo-UTP | 73 | N |
| 1-Methyl-6-bromo-pseudo-UTP | 74 | N |
| 1-Methyl-6-chloro-pseudo-UTP | 75 | N |
| 1-Methyl-6-fluoro-pseudo-UTP | 76 | N |
| 1-Methyl-6-methoxy-pseudo-UTP | 77 | N |
| 1-Methyl-6-ethoxy-pseudo-UTP | 78 | N |
| 1-Methyl-6-trifluoromethoxy-pseudo-UTP | 79 | N |
| 1-Methyl-6-phenyl-pseudo-UTP | 80 | N |
| 1-Methyl-6-(substituted phenyl)pseudo-UTP | 81 | N |
| 1-Methyl-6-cyano-pseudo-UTP | 82 | N |
| 1-Methyl-6-azido-pseudo-UTP | 83 | N |
| 1-Methyl-6-amino-pseudo-UTP | 84 | N |
| 1-Methyl-6-ethylcarboxylate-pseudo-UTP | 85 | N |
| 1-Methyl-6-hydroxy-pseudo-UTP | 86 | N |
| 1-Methyl-6-methylamino-pseudo-UTP | 87 | N |
| 1-Methyl-6-dimethylamino-pseudo-UTP | 88 | N |
| 1-Methyl-6-hydroxyamino-pseudo-UTP | 89 | N |
| 1-Methyl-6-formyl-pseudo-UTP | 90 | N |
| 1-Methyl-6-(4-morpholino)-pseudo-UTP | 91 | N |
| 1-Methyl-6-(4-thiomorpholino)-pseudo-UTP | 92 | N |
| 1-Alkyl-6-vinyl-pseudo-UTP | 93 | N |
| 1-Alkyl-6-allyl-pseudo-UTP | 94 | N |
| 1-Alkyl-6-homoallyl-pseudo-UTP | 95 | N |
| 1-Alkyl-6-ethynyl-pseudo-UTP | 96 | N |
| 1-Alkyl-6-(2-propynyl)-pseudo-UTP | 97 | N |
| 1-Alkyl-6-(1-propynyl)-pseudo-UTP | 98 | N |

### Example 22

### Incorporation of Naturally and Non-Naturally Occurring Nucleosides

[1188] Naturally and non-naturally occurring nucleosides are incorporated into mRNA encoding a polypeptide of interest. Examples of these are given in Tables 35 and 36. Certain commercially available nucleoside triphosphates (NTPs) are investigated in the polynucleotides of the invention. A selection of these are given in Table 36. The resultant mRNA are then examined for their ability to produce protein, induce cytokines, and/or produce a therapeutic outcome.

TABLE 35
Naturally and non-naturally occurring nucleosides

| | Compound | Naturally |
|---|---|---|
| Chemistry Modification | # | occuring |
| N4-Methyl-Cytosine | 1 | Y |
| N4,N4-Dimethyl-2′-OMe-Cytosine | 2 | Y |
| 5-Oxyacetic acid-methyl ester-Uridine | 3 | Y |
| N3-Methyl-pseudo-Uridine | 4 | Y |
| 5-Hydroxymethyl-Cytosine | 5 | Y |
| 5-Trifluoromethyl-Cytosine | 6 | N |
| 5-Trifluoromethyl-Uridine | 7 | N |
| 5-Methyl-amino-methyl-Uridine | 8 | Y |
| 5-Carboxy-methyl-amino-methyl-Uridine | 9 | Y |
| 5-Carboxymethylaminomethyl-2′-OMe-Uridine | 10 | Y |
| 5-Carboxymethylaminomethyl-2-thio-Uridine | 11 | Y |
| 5-Methylaminomethyl-2-thio-Uridine | 12 | Y |
| 5-Methoxy-carbonyl-methyl-Uridine | 13 | Y |
| 5-Methoxy-carbonyl-methyl-2′-OMe-Uridine | 14 | Y |
| 5-Oxyacetic acid-Uridine | 15 | Y |
| 3-(3-Amino-3-carboxypropyl)-Uridine | 16 | Y |
| 5-(carboxyhydroxymethyl)uridine methyl ester | 17 | Y |
| 5-(carboxyhydroxymethyl)uridine | 18 | Y |

TABLE 36
Non-naturally occurring nucleoside triphosphates

| | Compound | Naturally |
|---|---|---|
| Chemistry Modification | # | occuring |
| N1-Me-GTP | 1 | N |
| 2′-OMe-2-Amino-ATP | 2 | N |
| 2′-OMe-pseudo-UTP | 3 | Y |
| 2′-OMe-6-Me-UTP | 4 | N |
| 2′-Azido-2′-deoxy-ATP | 5 | N |
| 2′-Azido-2′-deoxy-GTP | 6 | N |
| 2′-Azido-2′-deoxy-UTP | 7 | N |
| 2′-Azido-2′-deoxy-CTP | 8 | N |
| 2′-Amino-2′-deoxy-ATP | 9 | N |
| 2′-Amino-2′-deoxy-GTP | 10 | N |
| 2′-Amino-2′-deoxy-UTP | 11 | N |
| 2′-Amino-2′-deoxy-CTP | 12 | N |
| 2-Amino-ATP | 13 | N |
| 8-Aza-ATP | 14 | N |
| Xanthosine-5′-TP | 15 | N |
| 5-Bromo-CTP | 16 | N |
| 2′-F-5-Methyl-2′-deoxy-UTP | 17 | N |
| 5-Aminoallyl-CTP | 18 | N |
| 2-Amino-riboside-TP | 19 | N |

### Example 23

### Incorporation of Modifications to the Nucleobase and Carbohydrate (Sugar)

[1189] Naturally and non-naturally occurring nucleosides are incorporated into mRNA encoding a polypeptide of interest. Commercially available nucleosides and NTPs having modifications to both the nucleobase and carbohydrate (sugar) are examined for their ability to be incorporated into mRNA and to produce protein, induce cytokines, and/or produce a therapeutic outcome. Examples of these nucleosides are given in Tables 37 and 38.

TABLE 37
Combination modifications

| Chemistry Modification | Compound |
|---|---|
| 5-iodo-2′-fluoro-deoxyuridine | 1 |
| 5-iodo-cytidine | 6 |
| 2′-bromo-deoxyuridine | 7 |
| 8-bromo-adenosine | 8 |
| 8-bromo-guanosine | 9 |
| 2,2′-anhydro-cytidine hydrochloride | 10 |
| 2,2′-anhydro-uridine | 11 |
| 2′-Azido-deoxyuridine | 12 |
| 2-amino-adenosine | 13 |
| N4-Benzoyl-cytidine | 14 |
| N4-Amino-cytidine | 15 |
| 2′-O-Methyl-N4-Acetyl-cytidine | 16 |
| 2′Fluoro-N4-Acetyl-cytidine | 17 |
| 2′Fluor-N4-Bz-cytidine | 18 |
| 2′-O-methyl-N4-Bz-cytidine | 19 |
| 2′-O-methyl-N6-Bz-deoxyadenosine | 20 |
| 2′Fluoro-N6-Bz-deoxyadenosine | 21 |
| N2-isobutyl-guanosine | 22 |
| 2′Fluro-N2-isobutyl-guanosine | 23 |
| 2′-O-methyl-N2-isobutyl-guanosine | 24 |

TABLE 38
Naturally occuring combinations

| | Compound | Naturally |
|---|---|---|
| Name | # | occurring |
| 5-Methoxycarbonylmethyl-2-thiouridine TP | 1 | Y |
| 5-Methylaminomethyl-2-thiouridine TP | 2 | Y |
| 5-Crbamoylmethyluridine TP | 3 | Y |
| 5-Carbamoylmethyl-2′-O-methyluridine TP | 4 | Y |
| 1-Methyl-3-(3-amino-3-carboxypropyl) | 5 | Y |
| pseudouridine TP | | |
| 5-Methylaminomethyl-2-selenouridine TP | 6 | Y |
| 5-Carboxymethyluridine TP | 7 | Y |
| 5-Methyldihydrouridine TP | 8 | Y |
| lysidine TP | 9 | Y |
| 5-Taurinomethyluridine TP | 10 | Y |
| 5-Taurinomethyl-2-thiouridine TP | 11 | Y |
| 5-(iso-Pentenylaminomethyl)uridine TP | 12 | Y |
| 5-(iso-Pentenylaminomethyl)-2-thiouridine TP | 13 | Y |
| 5-(iso-Pentenylaminomethyl)-2′-O- | 14 | Y |
| methyluridine TP | | |
| N4-Acetyl-2′-O-methylcytidine TP | 15 | Y |
| N4,2′-O-Dimethylcytidine TP | 16 | Y |
| 5-Formyl-2′-O-methylcytidine TP | 17 | Y |
| 2′-O-Methylpseudouridine TP | 18 | Y |
| 2-Thio-2′-O-methyluridine TP | 19 | Y |
| 3,2′-O-Dimethyluridine TP | 20 | Y |

[1190] In the tables “UTP” stands for uridine triphosphate, “GTP” stands for guanosine triphosphate, “ATP” stands for adenosine triphosphate, “CTP” stands for cytosine triphosphate, “TP” stands for triphosphate and “Bz” stands for benzyl.

### OTHER EMBODIMENTS

[1191] It is to be understood that the words which have been used are words of description rather than limitation, and that changes may be made within the purview of the appended claims without departing from the true scope and spirit of the invention in its broader aspects.

[1192] While the present invention has been described at some length and with some particularity with respect to the several described embodiments, it is not intended that it should be limited to any such particulars or embodiments or any particular embodiment, but it is to be construed with references to the appended claims so as to provide the broadest possible interpretation of such claims in view of the prior art and, therefore, to effectively encompass the intended scope of the invention.

[1193] All publications, patent applications, patents, and other references mentioned herein are incorporated by reference in their entirety. In case of conflict, the present specification, including definitions, will control. In addition, section headings, the materials, methods, and examples are illustrative only and not intended to be limiting.

What is claimed is:

1. A method for altering cell phenotype comprising contacting a cell with a composition comprising at least a first and a second cell phenotype altering polynucleotide, wherein each of said first cell phenotype altering polynucleotide and said second cell phenotype altering polynucleotide comprise:
(a) a first region of linked nucleosides, said first region encoding a cell phenotype altering polypeptide selected from the group consisting of SEQ ID NOs: 269-394;
(b) a first flanking region located at the 5′ terminus of said first region comprising;
(i) a sequence of linked nucleosides selected from the group consisting of the native 5′ untranslated region (UTR) of any of SEQ ID NOs: 269-394, SEQ ID NO: 1 and functional variants thereof;
(c) a second flanking region located at the 3′ terminus of said first region comprising;
(i′) a sequence of linked nucleosides selected from the group consisting of the native 3′ UTR of any of SEQ ID NOs: 269-394, SEQ ID NOs 2-7 and functional variants thereof; and
(ii′) a 3′ tailing sequence of linked nucleosides;
wherein the first region of linked nucleosides comprises at least a first modified nucleoside.

2. The method of claim 1 wherein each of the first cell phenotype altering polynucleotide and the second cell phenotype altering polynucleotide further comprise a poly-A tail.

3. The method of claim 2, wherein each of the first cell phenotype altering polynucleotide and the second cell phenotype altering polynucleotide further comprise at least one 5′ cap structure.

4. The method of claim 3, wherein the first region of the first cell phenotype altering polynucleotide encodes a first cell phenotype altering polypeptide selected from the group consisting of OCT4, SOX1, SOX2, SOX3, SOX15, SOX18, NANOG, KLF1, KLF2, KLF4, NR5A2, c-MYC, 1-MYC, n-MYC, REM2, TERT, LIN28 and variants thereof.

5. The composition of claim 4, wherein the first region of the second cell phenotype altering polynucleotide encodes a second cell phenotype altering polypeptide is selected from the group consisting of OCT4, SOX1, SOX2, SOX3, SOX15, SOX18, NANOG, KLF1, KLF2, KLF4, NR5A2, c-MYC, 1-MYC, n-MYC, REM2, TERT, LIN28 and variants thereof.

6. The composition of claim 5, wherein the first region of the first cell phenotype altering polynucleotide encodes OCT4 and the first region of the second cell phenotype altering polynucleotide encodes SOX2.

7. The composition of claim 6, wherein OCT4 has a sequence selected from the group consisting of SEQ ID NO: 269-294 and functional variants thereof.

8. The composition of claim 6, wherein SOX2 has a sequence selected from the group consisting of SEQ ID NO: 296 and 297 and functional variants thereof.

9. The method of claim 1, wherein the cell is a human cell.

10. The method of claim 1, wherein the cell is contacted at least twice.

11. The method of claim 1, wherein the cell is contacted a plurality of times.

12. The method of claim 1, wherein the composition further comprises a third and a fourth cell phenotype altering polynucleotide, wherein each of said third cell phenotype altering polynucleotide and said fourth cell phenotype altering polynucleotide comprise:
(a) a first region of linked nucleosides, said first region encoding a cell phenotype altering polypeptide selected from the group consisting of SEQ ID NOs: 269-394;
(b) a first flanking region located at the 5′ terminus of said first region comprising;
(i) a sequence of linked nucleosides selected from the group consisting of the native 5′ untranslated region (UTR) of any of SEQ ID NOs: 269-394, SEQ ID NO: 1 and functional variants thereof;
(c) a second flanking region located at the 3′ terminus of said first region comprising;
(i′) a sequence of linked nucleosides selected from the group consisting of the native 3′ UTR of any of SEQ ID NOs: 269-394, SEQ ID NOs 2-7 and functional variants thereof; and
(ii′) a 3′ tailing sequence of linked nucleosides;
wherein the first region of linked nucleosides comprises at least a first modified nucleoside.

13. The method of claim 12, wherein the first region of the third cell phenotype altering polynucleotide encodes a third cell phenotype altering polypeptide is selected from the group consisting of OCT4, SOX1, SOX2, SOX3, SOX15, SOX18, NANOG, KLF1, KLF2, KLF4, NR5A2, c-MYC, 1-MYC, n-MYC, REM2, TERT, LIN28 and variants thereof.

14. The method of claim 13, wherein the first region of the fourth cell phenotype altering polynucleotide encodes a fourth cell phenotype altering polypeptide is selected from the group consisting of OCT4, SOX1, SOX2, SOX3, SOX15, SOX18, NANOG, KLF1, KLF2, KLF4, NR5A2, c-MYC, 1-MYC, n-MYC, REM2, TERT, LIN28 and variants thereof.

15. The method of claim 14, wherein the first region of the first cell phenotype altering polynucleotide encodes OCT4, the first region of the second cell phenotype altering polynucleotide encodes SOX2, the first region of the third cell phenotype altering polynucleotide encodes KLF4 and the first region of the fourth cell phenotype altering polynucleotide encodes c-MYC.

16. The method of claim 14, wherein the first region of the first cell phenotype altering polynucleotide encodes OCT4, the first region of the second cell phenotype altering polynucleotide encodes SOX2, the first region of the third cell phenotype altering polynucleotide encodes LIN28 and the first region of the fourth cell phenotype altering polynucleotide encodes NANOG.

17. A composition comprising at least a first and a second cell phenotype altering polynucleotide, wherein each of said first cell phenotype altering polynucleotide and said second cell phenotype altering polynucleotide comprise:
(a) a first region of linked nucleosides, said first region encoding a cell phenotype altering polypeptide selected from the group consisting of SEQ ID NOs: 269-394;
(b) a first flanking region located at the 5′ terminus of said first region comprising;
(i) a sequence of linked nucleosides selected from the group consisting of the native 5′ untranslated region (UTR) of any of SEQ ID NOs: 269-394, SEQ ID NO: 1 and functional variants thereof;
(c) a second flanking region located at the 3′ terminus of said first region comprising;
(i′) a sequence of linked nucleosides selected from the group consisting of the native 3′ UTR of any of SEQ ID NOs: 269-394, SEQ ID NOs 2-7 and functional variants thereof; and
(ii′) a 3′ tailing sequence of linked nucleosides;
wherein the first region of linked nucleosides comprises at least a first modified nucleoside.

18. The composition of claim 17, further comprising a third and a fourth cell phenotype altering polynucleotide, wherein each of said third cell phenotype altering polynucleotide and said fourth cell phenotype altering polynucleotide comprise:
(a) a first region of linked nucleosides, said first region encoding a cell phenotype altering polypeptide selected from the group consisting of SEQ ID NOs: 269-394;
(b) a first flanking region located at the 5′ terminus of said first region comprising;
(i) a sequence of linked nucleosides selected from the group consisting of the native 5′ untranslated region (UTR) of any of SEQ ID NOs: 269-394, SEQ ID NO: 1 and functional variants thereof;
(c) a second flanking region located at the 3′ terminus of said first region comprising;
(i′) a sequence of linked nucleosides selected from the group consisting of the native 3′ UTR of any of SEQ ID NOs: 269-394, SEQ ID NOs 2-7 and functional variants thereof; and
(ii′) a 3′ tailing sequence of linked nucleosides;
wherein the first region of linked nucleosides comprises at least a first modified nucleoside.

19. A kit comprising the composition of claim 17.

20. The kit of claim 19, wherein the composition further comprises a third and a fourth cell phenotype altering polynucleotide, wherein each of said third cell phenotype altering polynucleotide and said fourth cell phenotype altering polynucleotide comprise:
(a) a first region of linked nucleosides, said first region encoding a cell phenotype altering polypeptide selected from the group consisting of SEQ ID NOs: 269-394;
(b) a first flanking region located at the 5′ terminus of said first region comprising;
(i) a sequence of linked nucleosides selected from the group consisting of the native 5′ untranslated region (UTR) of any of SEQ ID NOs: 269-394, SEQ ID NO: 1 and functional variants thereof;
(c) a second flanking region located at the 3′ terminus of said first region comprising;
(i′) a sequence of linked nucleosides selected from the group consisting of the native 3′ UTR of any of SEQ ID NOs: 269-394, SEQ ID NOs 2-7 and functional variants thereof; and
(ii′) a 3′ tailing sequence of linked nucleosides;
wherein the first region of linked nucleosides comprises at least a first modified nucleoside.

The application's sequence listing, which the Patent Office published only in electronic form, follows.

SEQUENCE LISTING (410 sequences)

SEQ ID NO: 1 - DNA, 47 bp, Homo sapiens
gggaaataagagagaaaagaagagtaagaagaaatataagagccacc

SEQ ID NO: 2 - DNA, 371 bp, Homo sapiens
gcgcctgcccacctgccaccgactgctggaacccagccagtgggagggcctggcccaccagagtcctgctccctcactcctcgccccgccccctgtcccagagtcccacctgggggctctctccacccttctcagagttccagtttcaaccagagttccaaccaatgggctccatcctctggattctggccaatgaaatatctccctggcagggtcctcttcttttcccagagctccaccccaaccaggagctctagttaatggagagctcccagcacactcggagcttgtgctttgtctccacgcaaagcgataaataaaagcattggtggcctttggtctttgaataaagcctgagtaggaagtctaga

SEQ ID NO: 3 - DNA, 568 bp, Homo sapiens
gcccctgccgctcccacccccacccatctgggccccgggttcaagagagagcggggtctgatctcgtgtagccatatagagtttgcttctgagtgtctgctttgtttagtagaggtgggcaggaggagctgaggggctggggctggggtgttgaagttggctttgcatgcccagcgatgcgcctccctgtgggatgtcatcaccctgggaaccgggagtggcccttggctcactgtgttctgcatggtttggatctgaattaattgtcctttcttctaaatcccaaccgaacttcttccaacctccaaactggctgtaaccccaaatccaagccattaactacacctgacagtagcaattgtctgattaatcactggccccttgaagacagcagaatgtccctttgcaatgaggaggagatctgggctgggcgggccagctggggaagcatttgactatctggaacttgtgtgtgcctcctcaggtatggcagtgactcacctggttttaataaaacaacctgcaacatctcatggtctttgaataaagcctgagtaggaagtctaga

SEQ ID NO: 4 - DNA, 289 bp, Homo sapiens
acacactccacctccagcacgcgacttctcaggacgacgaatcttctcaatgggggggcggctgagctccagccaccccgcagtcactttctttgtaacaacttccgttgctgccatcgtaaactgacacagtgtttataacgtgtacatacattaacttattacctcattttgttatttttcgaaacaaagccctgtggaagaaaatggaaaacttgaagaagcattaaagtcattctgttaagctgcgtaaatggtctttgaataaagcctgagtaggaagtctaga

SEQ ID NO: 5 - DNA, 379 bp, Homo sapiens
catcacatttaaaagcatctcagcctaccatgagaataagagaaagaaaatgaagatcaaaagcttattcatctgtttttctttttcgttggtgtaaagccaacaccctgtctaaaaaacataaatttctttaatcattttgcctcttttctctgtgcttcaattaataaaaaatggaaagaatctaatagagtggtacagcactgttatttttcaaagatgtgttgctatcctgaaaattctgtaggttctgtggaagttccagtgttctctcttattccacttcggtagaggatttctagtttcttgtgggctaattaaataaatcattaatactcttctaatggtctttgaataaagcctgagtaggaagtctaga

SEQ ID NO: 6 - DNA, 118 bp, Homo sapiens
gctgccttctgcggggcttgccttctggccatgcccttcttctctcccttgcacctgtacctcttggtctttgaataaagcctgagtaggaaggcggccgctcgagcatgcatctaga

SEQ ID NO: 7 - DNA, 908 bp, Homo sapiens
gccaagccctccccatcccatgtatttatctctatttaatatttatgtctatttaagcctcatatttaaagacagggaagagcagaacggagccccaggcctctgtgtccttccctgcatttctgagtttcattctcctgcctgtagcagtgagaaaaagctcctgtcctcccatcccctggactgggaggtagataggtaaataccaagtatttattactatgactgctccccagccctggctctgcaatgggcactgggatgagccgctgtgagcccctggtcctgagggtccccacctgggacccttgagagtatcaggtctcccacgtgggagacaagaaatccctgtttaatatttaaacagcagtgttccccatctgggtccttgcacccctcactctggcctcagccgactgcacagcggcccctgcatccccttggctgtgaggcccctggacaagcagaggtggccagagctgggaggcatggccctggggtcccacgaatttgctggggaatctcgtttttcttcttaagacttttgggacatggtttgactcccgaacatcaccgacgcgtctcctgtttttctgggtggcctcgggacacctgccctgcccccacgagggtcaggactgtgactctttttagggccaggcaggtgcctggacatttgccttgctggacggggactggggatgtgggagggagcagacaggaggaatcatgtcaggcctgtgtgtgaaaggaagctccactgtcaccctccacctcttcaccccccactcaccagtgtcccctccactgtcacattgtaactgaacttcaggataataaagtgtttgcctccatggtctttgaataaagcctgagtaggaaggcggccgctcgagcatgcatctaga

SEQ ID NO: 8 - DNA, 27 bp, Homo sapiens
ttggaccctcgtacagaagctaatacg

SEQ ID NO: 9 - DNA, 189 bp, Homo sapiens
ttttttttttttttttttttttttttttttttttttttttttttttttttttttttttttttttttttttttttttttttttttttttttttttttttttttttttttttttttttttttttttttttttttttttttttttttttttttttttttttttcttcctactcaggctttattcaaagacca

SEQ ID NO: 10 - DNA, 20 bp, Homo sapiens
ccttgaccttctggaacttc

SEQ ID NO: 11 - DNA, 20 bp, Homo sapiens
ccaagcactgaaacggatat

SEQ ID NO: 12 - DNA, 20 bp, Homo sapiens
gatgaaaagtgctccaagga

SEQ ID NO: 13 - DNA, 20 bp, Homo sapiens
aaccgtgatgaaaaggtacc

SEQ ID NO: 14 - DNA, 20 bp, Homo sapiens
tcatgcagattggaaaggtc

SEQ ID NO: 15 - DNA, 20 bp, Homo sapiens
cttcttggactgtccagagg

SEQ ID NO: 16 - DNA, 20 bp, Homo sapiens
gcagtccctgatacaagaac

SEQ ID NO: 17 - DNA, 20 bp, Homo sapiens
gattgaaggtggctcgctac

SEQ ID NO: 18 - DNA, 75 bp, Homo sapiens
atgatgccatcctcagtctcatggggtattttgctcttggcgggtctgtgctgtctcgtgccggtgtcgctcgca

SEQ ID NO: 19 - DNA, 90 bp, Homo sapiens
atggccggaccggcgactcagtcgcccatgaaactcatggccctgcagttgttgctttggcactcagccctctggaccgtccaagaggcg

SEQ ID NO: 20 - DNA, 137 bp, Homo sapiens
atgcagagagtgaacatgattatggccgagtccccatcgctcatcacaatctgcctgcttggtacctgctttccgccgaatgcactgtctttctggatcacgagaatgcgaataagatcttgaaccgacccaaacgg

SEQ ID NO: 21 - DNA, 63 bp, Homo sapiens
atgaaaggatcattgctgttgctcctcgtgtcgaaccttctgctttgccagtccgtagccccc

SEQ ID NO: 22 - DNA, 72 bp, Homo sapiens
atgaaatgggtgacgttcatctcactgttgtttttgttctcgtccgcctactccaggggagtattccgccga

SEQ ID NO: 23 - DNA, 63 bp, Homo sapiens
atgtggtggcggctctggtggctgctcctgttgctcctcttgctgtggcccatggtgtgggca

SEQ ID NO: 24 - DNA, 95 bp, Homo sapiens
tgctctttaacctccgcatcctgttgaataacgctgcgttccgaaatgggcataacttcatggtacgcaacttcagatgcggccagccactccag

SEQ ID NO: 25 - DNA, 87 bp, Homo sapiens
atgtccgtcttgacacccctgctcttgagagggctgacggggtccgctagacgcctgccggtaccgcgagcgaagatccactccctg

SEQ ID NO: 26 - DNA, 87 bp, Homo sapiens
atgagcgtgctcactccgttgcttcttcgagggcttacgggatcggctcggaggttgcccgtcccgagagcgaagatccattcgttg

SEQ ID NO: 27 - DNA, 175 bp, Unknown
  Description of Unknown: Bacterial Signal Sequence
tgacaaaaataactttatctccccagaattttagaatccaaaaacaggaaaccacactactaaaagaaaaatcaaccgagaaaaattctttagcaaaaagtattctcgcagtaaaaatcacttcatcgaattaaggtcaaaattatcggaacgttttatttcgcataagaacact

SEQ ID NO: 28 - DNA, 69 bp, Unknown
  Description of Unknown: Viral Signal Sequence
atgctgagctttgtggatacccgcaccctgctgctgctggcggtgaccagctgcctggcgacctgccag

SEQ ID NO: 29 - DNA, 96 bp, Unknown
  Description of Unknown: Viral Signal Sequence
atgggcagcagccaggcgccgcgcatgggcagcgtgggcggccatggcctgatggcgctgctgatggcgggcctgattctgccgggcattctggcg

SEQ ID NO: 30 - DNA, 51 bp, Unknown
  Description of Unknown: Viral Signal Sequence
atggcgggcattttttattttctgtttagctttctgtttggcatttgcgat

SEQ ID NO: 31 - DNA, 66 bp, Unknown
  Description of Unknown: Viral Signal Sequence
atggaaaaccgcctgctgcgcgtgtttctggtgtgggcggcgctgaccatggatggcgcgagcgcg

SEQ ID NO: 32 - DNA, 81 bp, Unknown
  Description of Unknown: Viral Signal Sequence
atggcgcgccagggctgctttggcagctatcaggtgattagcctgtttacctttgcgattggcgtgaacctgtgcctgggc

SEQ ID NO: 33 - DNA, 57 bp, Unknown
  Description of Unknown: Bacterial Signal Sequence
atgagccgcctgccggtgctgctgctgctgcagctgctggtgcgcccgggcctgcag

SEQ ID NO: 34 - DNA, 87 bp, Unknown
  Description of Unknown: Bacterial Signal Sequence
atgaaacagcagaaacgcctgtatgcgcgcctgctgaccctgctgtttgcgctgatttttctgctgccgcatagcagcgcgagcgcg

SEQ ID NO: 35 - DNA, 78 bp, Homo sapiens
atggcgacgccgctgcctccgccctccccgcggcacctgcggctgctgcggctgctgctctccgccctcgtcctcggc

SEQ ID NO: 36 - DNA, 54 bp, Homo sapiens
atgaaggctccgggtcggctcgtgctcatcatcctgtgctccgtggtcttctct

SEQ ID NO: 37 - DNA, 45 bp, Homo sapiens
atgcttcagctttggaaacttgttctcctgtgcggcgtgctcact

SEQ ID NO: 38 - DNA, 39 bp, Homo sapiens
atgctttatctccagggttggagcatgcctgctgtggca

SEQ ID NO: 39 - DNA, 144 bp, Homo sapiens
atggataacgtgcagccgaaaataaaacatcgccccttctgcttcagtgtgaaaggccacgtgaagatgctgcggctggatattatcaactcactggtaacaacagtattcatgctcatcgtatctgtgttggcactgatacca

SEQ ID NO: 40 - DNA, 96 bp, Homo sapiens
atgccctgcctagaccaacagctcactgttcatgccctaccctgccctgcccagccctcctctctggccttctgccaagtggggttcttaacagca

SEQ ID NO: 41 - DNA, 138 bp, Homo sapiens
atgaaaaccttgttcaatccagcccctgccattgctgacctggatccccagttctacaccctctcagatgtgttctgctgcaatgaaagtgaggctgagattttaactggcctcacggtgggcagcgctgcagatgct

SEQ ID NO: 42 - DNA, 57 bp, Homo sapiens
atgaagcctctccttgttgtgtttgtctttcttttcctttgggatccagtgctggca

SEQ ID NO: 43 - DNA, 63 bp, Homo sapiens
atgtcctgttccctaaagtttactttgattgtaatttttttttactgttggctttcatccagc

SEQ ID NO: 44 - DNA, 210 bp, Homo sapiens
atggttcttactaaacctcttcaaagaaatggcagcatgatgagctttgaaaatgtgaaagaaaagagcagagaaggagggccccatgcacacacacccgaagaagaattgtgtttcgtggtaacacactaccctcaggttcagaccacactcaacctgtttttccatatattcaaggttcttactcaaccactttcccttctgtggggt

SEQ ID NO: 45 - DNA, 96 bp, Homo sapiens
atggccaccccgccattccggctgataaggaagatgttttccttcaaggtgagcagatggatggggcttgcctgcttccggtccctggcggcatcc

SEQ ID NO: 46 - DNA, 87 bp, Homo sapiens
atgagctttttccaactcctgatgaaaaggaaggaactcattcccttggtggtgttcatgactgtggcggcgggtggagcctcatct

SEQ ID NO: 47 - DNA, 123 bp, Homo sapiens
atggtctcagctctgcggggagcacccctgatcagggtgcactcaagccctgtttcttctccttctgtgagtggaccacggaggctggtgagctgcctgtcatcccaaagctcagctctgagc

SEQ ID NO: 48 - DNA, 60 bp, Homo sapiens
atgatggggtccccagtgagtcatctgctggccggcttctgtgtgtgggtcgtcttgggc

SEQ ID NO: 49 - DNA, 69 bp, Homo sapiens
atggcaagcatggctgccgtgctcacctgggctctggctcttctttcagcgttttcggccacccaggca

SEQ ID NO: 50 - DNA, 135 bp, Homo sapiens
atggtgctcatgtggaccagtggtgacgccttcaagacggcctacttcctgctgaagggtgcccctctgcagttctccgtgtgcggcctgctgcaggtgctggtggacctggccatcctggggcaggcctacgcc

SEQ ID NO: 51 - DNA, 204 bp, Homo sapiens
atggattttgtcgctggagccatcggaggcgtctgcggtgttgctgtgggctaccccctggacacggtgaaggtcaggatccagacggagccaaagtacacaggcatctggcactgcgtccgggatacgtatcaccgagagcgcgtgtggggcttctaccggggcctctcgctgcccgtgtgcacggtgtccctggtatcttcc

SEQ ID NO: 52 - DNA, 147 bp, Homo sapiens
atggagaagcccctcttcccattagtgcctttgcattggtttggctttggctacacagcactggttgtttctggtgggatcgttggctatgtaaaaacaggcagcgtgccgtccctggctgcagggctgctcttcggcagtctagcc

SEQ ID NO: 53 - DNA, 45 bp, Homo sapiens
atgggtctgctccttcccctggcactctgcatcctagtcctgtgc

SEQ ID NO: 54 - DNA, 78 bp, Homo sapiens
atggggatccagacgagccccgtcctgctggcctccctgggggtggggctggtcactctgctcggcctggctgtgggc

SEQ ID NO: 55 - DNA, 75 bp, Homo sapiens
atgtcggacctgctactactgggcctgattgggggcctgactctcttactgctgctgacgctgctagcctttgcc

SEQ ID NO: 56 - DNA, 87 bp, Homo sapiens
atggagactgtggtgattgttgccataggtgtgctggccaccatgtttctggcttcgtttgcagccttggtgctggtttgcaggcag

SEQ ID NO: 57 - DNA, 105 bp, Homo sapiens
atgcgcggctctgtggagtgcacctggggttgggggcactgtgcccccagccccctgctcctttggactctacttctgtttgcagccccatttggcctgctgggg

SEQ ID NO: 58 - DNA, 171 bp, Homo sapiens
atgatgccgtcccgtaccaacctggctactggaatccccagtagtaaagtgaaatattcaaggctctccagcacagacgatggctacattgaccttcagtttaagaaaacccctcctaagatcccttataaggccatcgcacttgccactgtgctgtttttgattggcgcc

SEQ ID NO: 59 - DNA, 108 bp, Homo sapiens
atggccctgccccagatgtgtgacgggagccacttggcctccaccctccgctattgcatgacagtcagcggcacagtggttctggtggccgggacgctctgcttcgct

SEQ ID NO: 60 - DNA, 63 bp, Unknown
  Description of Unknown: Bacterial Signal Sequence
tgaaaaagtggttcgttgctgccggcatcggcgctgccggactcatgctctccagcgccgcca

SEQ ID NO: 61 - DNA, 63 bp, Unknown
  Description of Unknown: Bacterial Signal Sequence
atgaaacagagcaccattgcgctggcgctgctgccgctgctgtttaccccggtgaccaaagcg

SEQ ID NO: 62 - DNA, 63 bp, Unknown
  Description of Unknown: Bacterial Signal Sequence
atgaaaaaaaccgcgattgcgattgcggtggcgctggcgggctttgcgaccgtggcgcaggcg

SEQ ID NO: 63 - DNA, 63 bp, Unknown
  Description of Unknown: Bacterial Signal Sequence
atgaaaaaactgatgctggcgattttttttagcgtgctgagctttccgagctttagccagagc

SEQ ID NO: 64 - DNA, 69 bp, Unknown
  Description of Unknown: Bacterial Signal Sequence
atgaaaaaaaacattgcgtttctgctggcgagcatgtttgtgtttagcattgcgaccaacgcgtatgcg

SEQ ID NO: 65 - DNA, 96 bp, Homo sapiens
atgtttgcgaaacgctttaaaaccagcctgctgccgctgtttgcgggctttctgctgctgtttcatctggtgctggcgggcccggcggcggcgagc

SEQ ID NO: 66 - DNA, 57 bp, Homo sapiens
atgcgctttccgagcatttttaccgcggtgctgtttgcggcgagcagcgcgctggcg

SEQ ID NO: 67 - DNA, 57 bp, Homo sapiens
atgcgctttccgagcatttttaccaccgtgctgtttgcggcgagcagcgcgctggcg

SEQ ID NO: 68 - DNA, 57 bp, Homo sapiens
atgcgctttccgagcatttttaccagcgtgctgtttgcggcgagcagcgcgctggcg

SEQ ID NO: 69 - DNA, 57 bp, Homo sapiens
atgcgctttccgagcatttttacccatgtgctgtttgcggcgagcagcgcgctggcg

SEQ ID NO: 70 - DNA, 57 bp, Homo sapiens
atgcgctttccgagcatttttaccattgtgctgtttgcggcgagcagcgcgctggcg

SEQ ID NO: 71 - DNA, 57 bp, Homo sapiens
atgcgctttccgagcatttttacctttgtgctgtttgcggcgagcagcgcgctggcg

SEQ ID NO: 72 - DNA, 57 bp, Homo sapiens
atgcgctttccgagcatttttaccgaagtgctgtttgcggcgagcagcgcgctggcg

SEQ ID NO: 73 - DNA, 57 bp, Homo sapiens
atgcgctttccgagcatttttaccggcgtgctgtttgcggcgagcagcgcgctggcg

SEQ ID NO: 74 - DNA, 63 bp, Homo sapiens
atgcgttcctcccccctcctccgctccgccgttgtggccgccctgccggtgttggcccttgcc

SEQ ID NO: 75 - DNA, 66 bp, Homo sapiens
atgggcgcggcggccgtgcgctggcacttgtgcgtgctgctggccctgggcacacgcgggcggctg

SEQ ID NO: 76 - DNA, 53 bp, Artificial Sequence
  Description of Artificial Sequence: Signal Sequence
atgaggagctcccttgtgctgttctttgtctctgcgtggacggccttggccag

SEQ ID NO: 77 - DNA, 96 bp, Homo sapiens
atgctcaggggtccgggacccgggcggctgctgctgctagcagtcctgtgcctggggacatcggtgcgctgcaccgaaaccgggaagagcaagagg

SEQ ID NO: 78 - DNA, 69 bp, Homo sapiens
atgcttaggggtccggggcccgggctgctgctgctggccgtccagctggggacagcggtgccctccacg

SEQ ID NO: 79 - DNA, 93 bp, Homo sapiens
atgcgccggggggccctgaccgggctgctcctggtcctgtgcctgagtgttgtgctacgtgcagccccctctgcaacaagcaagaagcgcagg

SEQ ID NO: 80 - protein, 24 aa, Homo sapiens
MMPSSVSWGILLAGLCCLVPVSLA

SEQ ID NO: 81 - protein, 30 aa, Homo sapiens
MAGPATQSPMKLMALQLLLWHSALWTVQEA

SEQ ID NO: 82 - protein, 46 aa, Homo sapiens
MQRVNMIMAESPSLITICLLGYLLSAECTVFLDHENANKILNRPKR

SEQ ID NO: 83 - protein, 21 aa, Homo sapiens
MKGSLLLLLVSNLLLCQSVAP

SEQ ID NO: 84 - protein, 24 aa, Homo sapiens
MKWVTFISLLFLFSSAYSRGVFRR

SEQ ID NO: 85 - protein, 19 aa, Homo sapiens
MWWRLWWLLLLLLLLPMWA

SEQ ID NO: 86 - protein, 32 aa, Homo sapiens
MLFNLRILLNNAAFRNGHNFMVRNFRCGQPLQ

SEQ ID NO: 87 - protein, 29 aa, Homo sapiens
MSVLTPLLLRGLTGSARRLPVPRAKIHSL

SEQ ID NO: 88 - protein, 29 aa, Homo sapiens
MSVLTPLLLRGLTGSARRLPVPRAKIHSL

SEQ ID NO: 89 - protein, 59 aa, Unknown
  Description of Unknown: Bacterial Signal Sequence
VTKITLSPQNFRIQKQETTLLKEKSTEKNSLAKSILAVKNHFIELRSKLSERFISHKNT

SEQ ID NO: 90 - protein, 23 aa, Unknown
  Description of Unknown: Viral Signal Sequence
MLSFVDTRTLLLLAVTSCLATCQ

SEQ ID NO: 91 - protein, 32 aa, Unknown
  Description of Unknown: Viral Signal Sequence
MGSSQAPRMGSVGGHGLMALLMAGLILPGILA

SEQ ID NO: 92 - protein, 17 aa, Unknown
  Description of Unknown: Viral Signal Sequence
MAGIFYFLFSFLFGICD

SEQ ID NO: 93 - protein, 22 aa, Unknown
  Description of Unknown: Viral Signal Sequence
MENRLLRVFLVWAALTMDGASA

SEQ ID NO: 94 - protein, 27 aa, Unknown
  Description of Unknown: Viral Signal Sequence
MARQGCFGSYQVISLFTFAIGVNLCLG

SEQ ID NO: 95 - protein, 19 aa, Unknown
  Description of Unknown: Bacterial Signal Sequence
MSRLPVLLLLQLLVRPGLQ

SEQ ID NO: 96 - protein, 29 aa, Unknown
  Description of Unknown: Bacterial Signal Sequence
MKQQKRLYARLLTLLFALIFLLPHSSASA

SEQ ID NO: 97 - protein, 22 aa, Homo sapiens
MATPLPPPSPRHLRLLRLLLSG

SEQ ID NO: 98 - protein, 18 aa, Homo sapiens
MKAPGRLVLIILCSVVFS

SEQ ID NO: 99 - protein, 13 aa, Homo sapiens
MLQLWKLLCGVLT

SEQ ID NO: 100 - protein, 13 aa, Homo sapiens
MLYLQGWSMPAVA

SEQ ID NO: 101 - protein, 48 aa, Homo sapiens
MDNVQPKIKHRPFCFSVKGHVKMLRLDIINSLVTTVFMLIVSVLALIP

SEQ ID NO: 102 - protein, 32 aa, Homo sapiens
MPCLDQQLTVHALPCPAQPSSLAFCQVGFLTA

SEQ ID NO: 103 - protein, 46 aa, Homo sapiens
MKTLFNPAPAIADLDPQFYTLSDVFCCNESEAEILTGLTVGSAADA

SEQ ID NO: 104 - protein, 19 aa, Homo sapiens
MKPLLVVFVFLFLWDPVLA

SEQ ID NO: 105 - protein, 21 aa, Homo sapiens [sequence omitted]

SEQ ID NO: 106 - protein, 70 aa, Homo sapiens
MVLTKPLQRNGSMMSFENVKEKSREGGPHAHTPEEELCFVVTHTPQVQTTLNLFFHIFKVLTQPLSLLWG

SEQ ID NO: 107 - protein, 32 aa, Homo sapiens
MATPPFRLIRKMFSFKVSRWMGLACFRSLAAS

SEQ ID NO: 108 - protein, 29 aa, Homo sapiens
MSFFQLLMKRKELIPLVVFMTVAAGGASS

SEQ ID NO: 109 - protein, 41 aa, Homo sapiens
MVSALRGAPLIRVHSSPVSSPSVSGPAALVSCLSSQSSALS

SEQ ID NO: 110 - protein, 20 aa, Homo sapiens
MMGSPVSHLLAGFCVWVVLG

SEQ ID NO: 111 - protein, 23 aa, Homo sapiens
MASMAAVLTWALALLSAFSATQA

SEQ ID NO: 112 - protein, 45 aa, Homo sapiens
MVLMWTSGDAFKTAYFLLKGAPLQFSVCGLLQVLVDLAILGQATA

SEQ ID NO: 113 - protein, 68 aa, Homo sapiens
MDFVAGAIGGVCGVAVGYPLDTVKVRIQTEPLYTGIWHCVRDTYHRERVWGFYRGLSLPVCTVSLVSS

SEQ ID NO: 114 - protein, 49 aa, Homo sapiens
MEKPLFPLVPLHWFGFGYTALVVSGGIVGYVKTGSVPSLAAGLLFGSLA

SEQ ID NO: 115 - protein, 15 aa, Homo sapiens
MGLLLPLALCILVLC

SEQ ID NO: 116 - protein, 26 aa, Homo sapiens
MGIQTSPVLLASLGVGLVTLLGLAVG

SEQ ID NO: 117 - protein, 25 aa, Homo sapiens
MSDLLLLGLIGGLTLLLLLTLLAFA

SEQ ID NO: 118 - protein, 29 aa, Homo sapiens
METVVIVAIGVLATIFLASFAALVLVCRQ

SEQ ID NO: 119 - protein, 35 aa, Homo sapiens
MAGSVECTWGWGHCAPSPLLLWTLLLFAAPFGLLG

SEQ ID NO: 120 - protein, 57 aa, Homo sapiens
MMPSRTNLATGIPSSKVKYSRLSSTDDGYIDLQFKKTPPKIPYKAIALATVLFLIGA

SEQ ID NO: 121 - protein, 36 aa, Homo sapiens
MALPQMCDGSHLASTLRYCMTVSGTVVLVAGTLCFA

SEQ ID NO: 122 - protein, 21 aa, Unknown
  Description of Unknown: Bacterial Signal Sequence
MKKWFVAAGIGAGLLMLSSAA

SEQ ID NO: 123 - protein, 21 aa, Unknown
  Description of Unknown: Bacterial Signal Sequence
MKQSTIALALLPLLFTPVTKA

SEQ ID NO: 124 - protein, 21 aa, Unknown
  Description of Unknown: Bacterial Signal Sequence
MKKTAIAIAVALAGFATVAQA

SEQ ID NO: 125 - protein, 21 aa, Unknown
  Description of Unknown: Bacterial Signal Sequence
MKKLMLAIFFSVLSFPSFSQS

SEQ ID NO: 126 - protein, 23 aa, Unknown
  Description of Unknown: Bacterial Signal Sequence
MKKNIAFLLASMFVFSIATNAYA

SEQ ID NO: 127 - protein, 32 aa, Homo sapiens
MFAKRFKTSLLPLFAGFLLLFHLVLAGPAAAS

SEQ ID NO: 128 - protein, 19 aa, Homo sapiens
MRFPSIFTAVLFAASSALA

SEQ ID NO: 129 - protein, 19 aa, Homo sapiens
MRFPSIFTTVLFAASSALA

SEQ ID NO: 130 - protein, 19 aa, Homo sapiens
MRFPSIFTSVLFAASSALA

SEQ ID NO: 131 - protein, 19 aa, Homo sapiens
MRFPSIFTHVLFAASSALA

SEQ ID NO: 132 - protein, 19 aa, Homo sapiens
MRFPSIFTIVLFAASSALA

SEQ ID NO: 133 - protein, 19 aa, Homo sapiens
MRFPSIFTFVLFAASSALA

SEQ ID NO: 134 - protein, 19 aa, Homo sapiens
MRFPSIFTEVLFAASSALA

SEQ ID NO: 135 - protein, 19 aa, Homo sapiens
MRFPSIFTGVLFAASSALA

SEQ ID NO: 136 - protein, 21 aa, Homo sapiens
MRSSPLLRSAVVAALPVLALA

SEQ ID NO: 137 - protein, 22 aa, Homo sapiens
MGAAAVRWHLCVLLALGTRGRL

SEQ ID NO: 138 - protein, 17 aa, Artificial Sequence
  Description of Artificial Sequence: Signal Sequence
MRSSLVLFFVSAWTALA

SEQ ID NO: 139 - protein, 32 aa, Homo sapiens
MLRGPGPGRLLLLAVLCLGTSVRCTETGKSKR

SEQ ID NO: 140 - protein, 26 aa, Homo sapiens
MLRGPGPGLLLLAVQCLGTAVPSTGA

SEQ ID NO: 141 - protein, 31 aa, Homo sapiens
MRRGALTGLLLVLCLSVVLRAAPSATSKKRR

SEQ ID NO: 142 - DNA, 911 bp, Homo sapiens
atggcgggacacctggcttcggatttcgccttctcgccccctccaggtggtggaggtgatgggccaggggggccggagccgggctgggttgatcctcggacctggctaagcttccaaggccctcctggagggccaggaatcgggccgggggttgggccaggctctgaggtgtgggggattcccccatgccccccgccgtatgagttctgtggggggatggcgtactgtgggccccaggttggagtggggctagtgccccaaggcggcttggagacctctcagcctgagggcgaagcaggaggtggagagcaactccgatggggcctccccggagccctgcaccgtcacccctggtgccgtgaagctggagaaggagaagctggagcaaaacccggaggagtcccaggacatcaaagctctgcagaaagaactcgagcaatttgccaagctcctgaagcagaagaggatcaccctgggatatacacaggccgatgtggggctcaccctgggggttctatttgggaaggtattcagccaaacgaccatctgccgctttgaggctctgcagcttagcttcaagaacatgtgtaagctgcggcccttgctgcagaagtgggtggaggaagctgacaacaatgaaaatcttcaggagatatgcaaagcagaaaccctcgtgcaggcccgaaagagaaagcgaaccagtatcgagaaccgagtgagaggcaacctggagaatttgttcctgcagtgcccgaaacccacactgcagcagatcagccacatcgcccagcagcttgggctcgagaaggatgtggtccgagtgtggttctgtaaccggcgccagaagggcaagcgatcaagcagcgactatgcacaacgagaggattttgaggctgctgggtctcctttct

SEQ ID NO: 143 - DNA, 3262 bp, Homo sapiens
ccttcgcaagccctcatttcaccaggcccccggcttggggcgccttccttccccatggcgggacacctggcttcggatttcgccttctcgccccctccaggtggtggaggtgatgggccaggggggccggagccgggctgggttgatcctcggacctggctaagcttccaaggccctcctggagggccaggaatcgggccgggggttgggccaggctctgaggtgtgggggattcccccatgccccccgccgtatgagttctgtggggggatggcgtactgtgggccccaggttggagtggggctagtgccccaaggcggcttggagacctctcagcctgagggcgaagcaggagtcggggtggagagcaactccgatggggcctccccggagccctgcaccgtcacccctggtgccgtgaagctggagaaggagaagctggagcaaaacccggaggagtcccaggacatcaaagctctgcagaaagaactcgagcaatttgccaagctcctgaagcagaagaggatcaccctgggatatacacaggccgatgtggggctcaccctgggggttctatttgggaaggtattcagccaaacgaccatctgccgctttgaggctctgcagcttagcttcaagaacatgtgtaagctgcggcccttgctgcagaagtgggtggaggaagctgacaacaatgaaaatcttcaggagatatgcaaagcagaaaccctcgtgcaggcccgaaagagaaagcgaaccagtatcgagaaccgagtgagaggcaacctggagaatttgttcctgcagtgcccgaaacccacactgcagcagatcagccacatcgcccagcagcttgggctcgagaaggatgtggtccgagtgtggttctgtaaccggcgccagaagggcaagcgatcaagcagcgactatgcacaacgagaggattttgaggctgctgggtctcctttctcagggggaccagtgtcctttcctctggccccagggccccattttggtaccccaggctatgggagccctcacttcactgcactgtactcctcggtccctttccctgagggggaagcctttccccctgtctccgtcaccactctgggctctcccatgcattcaaactgaggtgcctgcccttctaggaatgggggacagggggaggggaggagctagggaaagaaaacctggagtttgtgccagggtttttgggattaagttcttcattcactaaggaaggaattgggaacacaaagggtgggggcaggggagtttggggcaactggttggagggaaggtgaagttcaatgatgctcttgattttaatcccacatcatgtatcacttttttcttaaataaagaagcctgggacacagtagatagacacacttatcttggtttgtccttcagttactgaggtagggatgggaatatccaatgctcatacccaagtgaccctgaaactaaggtgccatttacactccttaaggtcacacaacatcagagggagagctgggattgcagccaagtttatttgtacagggccctgtgataggctagttcccaaaagcctgtgatgcaagaacttttgcccatagactcagtcaccatgtagctgttacctgttcagagctggctttttgctttcccaccctactctggaattcttaaatggctttatacttagaaatcatcttatttctgttgaacctagatcaccccaaccagaaacttctattaatactttgtgctttcttgataccagggtctatttggtttccacttaaggtttttgcatactctgcccataagtgactcattagttactcaagttttattcctggctctgccactagttcattaggggtctttgccccagagtcatttcttccattttaaaaacttgggctcattaaatctaggtaggaaagggcgggtgtggcaggttttaatagaacaggtcaagataaggctttatttctatagaaatgatgctttgacaatagtttggcttggtgtaaggctcacaaaagaaaatcacatgtaccatgtgtgggttaagcggtttgattcacactgaaccaggccagcccagttgccctctgctgtgtccacccgtggagtggagctgtgtcacagccatcacactggtaaactgctgtagctggtttaccaggctttctcttgccctgacagtacaggtgaagcctgtaaataaatcttctgctatctttgtgaacttaaccaaatcccagttaccttatttaaatggcaatagatctgttttcccttaaactagaaaccttaattacctgtattcctacctccagctcaacccatatatttgcacctttccagtaagcaggtttgtatttccatctctccccttcccctaagattctgaattagttctccagaccttgccaagcacattctccctggaaagcaaggaatatcacagacccacaagaagagtaaatgcccaggagtgaatgaagcggcttgtccttgacttggaaataaaagcaaagctgtgaaaagccaggtcgctacgattttgttggcagcaggactagccacagagtagggaagttttggggccaggccctaggttttcccagaatgccttgggtgatgccaccaagaaccttaagaactccctcttacattttccatcggttgcaggcatggcttttgcaactgataggtgctctgactacagatattctggtgtccatggcaacatggccttatggcttgtaatagtgggaacttccagctcactggcaatttcctggaggtggcaatatctttggcaggaaaccatctcttctgtcttggccaccagggtctgctccaggccctgaatgagtccacatcaatccatccttcttccctgtagtcattccctcctggggagggaagggaaggggggtatttatcagacctatttgctcgctgctgtgtctactcatgggcaggtgtgtccgatggtgccttggcagtggaccttaggtctgaatgccagcccggcaccctgggcatcggaagtcggcctccctggcagcctggatgctgcagccaacacaggccacatggaaccagacgtcacagccatcacactgaacccaggccactgtctcttcctggggcaggcagcaacaaggagctgcacagggctccccgcccccaactgcagggggagccatgggagcgctcactgggtacttccgaggacggccacgtcgatttc

SEQ ID NO: 144 - DNA, 1395 bp, Homo sapiens
ccttcgcaagccctcatttcaccaggcccccggcttggggcgccttccttccccatggcgggacacctggcttcggatttcgccttctcgccccctccaggtggtggaggtgatgggccaggggggccggagccgggctgggttgatcctcggacctggctaagcttccaaggccctcctggagggccaggaatcgggccgggggttgggccaggctctgaggtgtgggggattcccccatgccccccgccgtatgagttctgtggggggatggcgtactgtgggccccaggttggagtggggctagtgccccaaggcggcttggagacctctcagcctgagggcgaagcaggagtcggggtggagagcaactccgatggggcctccccggagccctgcaccgtcacccctggtgccgtgaagctggagaaggagaagctggagcaaaacccggaggagtcccaggacatcaaagctctgcagaaagaactcgagcaatttgccaagctcctgaagcagaagaggatcaccctgggatatacacaggccgatgtgcaccctgggggttctatttgggaaggtattcagccaaacgaccatctgccgctttgaggctctgcagcttagcttcaagaacatgtgtaagctgcggcccttgctgcagaagtgggtggaggaagctgacaacaatgaaaatcttcaggagatatgcaaagcagaaaccctcgtgcaggcccgaaagagaaagcgaaccagtatcgagaaccgagtgagaggcaacctggagaatttgttcctgcagtgcccgaaacccacactgcagcagatcagccacatcgcccagcagcttgggctcgagaaggatgtggtccgagtgtggttctgtaaccggcgccagaagggcaagcgatcaagcagcgactatgcacaacgagaggattttgaggctgctgggtctcctttctcagggggaccagtgtcctttcctctggccccagggccccattttggtaccccaggctatgggagccctcacttcactgcactgtactcctcggtccctttccctgagggggaagcctttccccctgtctctgtcaccactctgggctctcccatgcattcaaactgaggtgcctgcccttctaggaatgggggacagggggaggggaggagctagggaaagaaaacctggagtttgtgccagggtttttgggattaagttcttcattcactaaggaaggaattgggaacacaaagggtgggggcaggggagtttggggcaactggttggagggaaggtgaagttcaatgatgctcttgattttaatcccacatcatgtatcacttttttcttaaataaagaagcctgggacacagtagatagacacactt

SEQ ID NO: 145 - DNA, 1163 bp, Homo sapiens
gtagtcctttgttacatgcatgagtcagtgaacagggaatgggtgaatgacatttgtgggtaggttatttctagaagttaggtgggcagcttggaaggcagatgcacttctacagactattccttggggccacacgtaggttcttgaatcccgaatggaaaggggagattgataactggtgtgtttatgttcttacaagtcttctgccttttaaaatccagtcccaggacatcaaagctctgcagaaagaactcgagcaatttgccaagctcctgaagcagaagaggatcaccctgggatatacacaggccgatgtggggctcaccctgggggttctatttgggaaggtattcagccaaacgaccatctgccgctttgaggctctgcagcttagcttcaagaacatgtgtaagctgcggcccttgctgcagaagtgggtggaggaagctgacaacaatgaaaatcttcaggagatatgcaaagcagaaaccctcgtgcaggcccgaaagagaaagcgaaccagtatcgagaaccgagtgagaggcaacctggagaatttgttcctgcagtgcccgaaacccacactgcagcagatcagccacatcgcccagcagcttgggctcgagaaggatgtggtccgagtgtggttctgtaaccggcgccagaagggcaagcgatcaagcagcgactatgcacaacgagaggattttgaggctgctgggtctcctttctcagggggaccagtgtcctttcctctggccccagggccccattttggtaccccaggctatgggagccctcacttcactgcactgtactcctcggtccctttccctgagggggaagcctttccccctgtctctgtcaccactctgggctctcccatgcattcaaactgaggtgcctgcccttctaggaatgggggacagggggaggggaggagctagggaaagaaaacctggagtttgtgccagggtttttgggattaagttcttcattcactaaggaaggaattgggaacacaaagggtgggggcaggggagtttggggcaactggttggagggaaggtgaagttcaatgatgctcttgattttaatcccacatcatgtatcacttttttcttaaataaagaagcctgggacacagtagatagacacactta

SEQ ID NO: 146 - DNA, 1420 bp, Homo sapiens
agagaggggttgagtagtcccttcgcaagccctcatttcaccaggcccccggcttggggcgccttccttccccatggcgggacacctggcttcggatttcgccttctcgccccctccaggtggtggaggtgatgggccaggggggccggagccgggctgggttgatcctcggacctggctaagcttccaaggccctcctggagggccaggaatcgggccgggggttgggccaggctctgaggtgtgggggattcccccatgccccccgccgtatgagttctgtggggggatggcgtactgtgggccccaggttggagtggggctagtgccccaaggcggcttggagacctctcagcctgagggcgaagcaggagtcggggtggagagcaactccgatggggcctccccggagccctgcaccgtcacccctggtgccgtgaagctggagaaggagaagctggagcaaaacccggaggagtcccaggacatcaaagctctgcagaaagaactcgagcaatttgccaagctcctgaagcagaagaggatcaccctgggatatacacaggccgatgtggggctcaccctgggggttctatttgggaaggtattcagccaaacgaccatctgccgctttgaggctctgcagcttagcttcaagaacatgtgtaagctgcggcccttgctgcagaagtgggtggaggaagctgacaacaatgaaaatcttcaggagatatgcaaagcagaaaccctcgtgcaggcccgaaagagaaagcgaaccagtatcgagaaccgagtgagaggcaacctggagaatttgttcctgcagtgcccgaaacccacactgcagcagatcagccacatcgcccagcagcttgggctcgagaaggatgtggtccgagtgtggttctgtaaccggcgccagaagggcaagcgatcaagcagcgactatgcacaacgagaggattttgaggctgctgggtctcctttctcagggggaccagtgtcctttcctctggccccagggccccattttggtaccccaggctatgggagccctcacttcactgcactgtactcctcggtccctttccctgagggggaagcctttccccctgtctctgtcaccactctgggctctcccatgcattcaaactgaggtgcctgcccttctaggaatgggggacagggggaggggaggagctagggaaagaaaacctggagtttgtgccagggtttttgggattaagttcttcattcactaaggaaggaattgggaacacaaagggtgggggcaggggagtttggggcaactggttggagggaaggtgaagttcaatgatgctcttgattttaatcccacatcatgtatcacttttttcttaaataaagaagcctgggacacagtagatagacacactta

SEQ ID NO: 147 - DNA, 369 bp, Homo sapiens
atggcgggacacctggcttcggatttcgccttctcgccccctccaggtggtggaggtgatgggccaggggggccggagccgggctgggttgatcctcggacctggctaagcttccaaggccctcctggagggccaggaatcgggccgggggttgggccaggctctgaggtgtgggggattcccccatgccccccgccgtatgagttctgtggggggatggcgtactgtgggccccaggttggagtggggctagtgccccaaggcggcttggagacctctcagcctgagggcgaagcaggagtcggggtggagactccgatggggcctccccggagccctgcaccgcatccatttcctttcccactcctg

SEQ ID NO: 148 - DNA, 1163 bp, Homo sapiens
gtagtcctttgttacatgcatgagtcagtgaacagggaatgggtgaatgacatttgtgggtaggttatttctagaagttaggtgggcagcttggaaggcagatgcacttctacagactattccttggggccacacgtaggttcttgaatcccgaatggaaaggggagattgataactggtgtgtttatgttcttacaagtcttctgccttttaaaatccagtcccaggacatcaaagctctgcagaaagaactcgagcaatttgccaagctcctgaagcagaagaggatcaccctgggatatacacaggccgatgtggggctcaccctgggggttctatttgggaaggtattcagccaaacgaccatctgccgctttgaggctctgcagcttagcttcaagaacatgtgtaagctgcggcccttgctgcagaagtgggtggaggaagctgacaacaatgaaaatcttcaggagatatgcaaagcagaaaccctcgtgcaggcccgaaagagaaagcgaaccagtatcgagaaccgagtgagaggcaacctggagaatttgttcctgcagtgcccgaaacccacactgcagcagatcagccacatcgcccagcagcttgggctcgagaaggatgtggtccgagtgtggttctgtaaccggcgccagaagggcaagcgatcaagcagcgactatgcacaacgagaggattttgaggctgctgggtctcctttctcagggggaccagtgtcctttcctctggccccagggccccattttggtaccccaggctatgggagccctcacttcactgcactgtactcctcggtccctttccctgagggggaagcctttccccctgtctctgtcaccactctgggctctcccatgcattcaaactgaggtgcctgcccttctaggaatgggggacagggggaggggaggagctagggaaagaaaacctggagtttgtgccagggtttttgggattaagttcttcattcactaaggaaggaattgggaacacaaagggtgggggcaggggagtttggggcaactggttggagggaaggtgaagttcaatgatgctcttgattttaatcccacatcatgtatcacttttttcttaaataaagaagcttgggacacagtagatagacacactta

SEQ ID NO: 149 - DNA, 1420 bp, Homo sapiens
agagaggggttgagtagtcccttcgcaagccctcatttcaccaggcccccggcttggggcgccttccttccccatggcgggacacctggcttcagatttcgccttctcgccccctccaggtggtggaggtgatgggccaggggggccggagccgggctgggttgatcctcggacctggctaagcttccaaggccctcctggagggccaggaatcgggccgggggttgggccaggctctgaggtgtgggggattcccccatgccccccgccgtatgagttctgtggggggatggcgtactgtgggccccaggttggagtggggctagtgccccaaggcggcttggagacctctcagcctgagggtgaagcaggagtcggggtggagagcaactccgatggggcctccccggagccctgcaccgtcacccctggtgccgtgaagctggagaaggagaagctggagcaaaacccggaggagtcccaggacatcaaagctctgcagaaagaactcgagcaatttgccaagctcctgaagcagaagaggatcaccctgggatatacacaggccgatgtggggctcaccctgggggttctatttgggaaggtattcagccaaacgaccatctgccgctttgaggctctgcagcttagcttcaagaacatgtgtaagctgcggcccttgctgcagaagtgggtggaggaagctgacaacaatgaaaatcttcaggagatatgcaaagcagaaaccctcgtgcaggcccgaaagagaaagcgaaccagtatcgagaaccgagtgagaggcaacctggagaatttgttcctgcagtgcccgaaacccacactgcagcagatcagccacatcgcccagcagcttgggctcgagaaggatgtggtccgagtgtggttctgtaaccggcgccagaagggcaagcgatcaagcagcgactatgcacaacgagaggattttgaggctgctgggtctcctttctcagggggaccagtgtcctttcctctggccccagggccccattttggtaccccaggctatgggagccctcacttcactgcactgtactcctcggtccctttccctgagggggaagcctttccccctgtctctgtcaccactctgggctctcccatgcattcaaactgaggtgcctgcccttctaggaatgggggacagggggaggggaggagctagggaaagaaaacctggagtttgtgccagggtttttgggattaagttcttcattcactaaggaaggaattgggaacacaaagggtgggggcaggggagtttggggcaactggttggagggaaggtgaagttcaatgatgctcttgattttaatcccacatcatgtatcacttttttcttaaataaagaagcttgggacacagtagatagacacactta

SEQ ID NO: 150 - DNA, 1395 bp, Homo sapiens
ccttcgcaagccctcatttcaccaggcccccggcttggggcgccttccttccccatggcgggacacctggcttcagatttcgccttctcgccccctccaggtggtggaggtgatgggccaggggggccggagccgggctgggttgatcctcggacctggctaagcttccaaggccctcctggagggccaggaatcgggccgggggttgggccaggctctgaggtgtgggggattcccccatgccccccgccgtatgagttctgtggggggatggcgtactgtgggccccaggttggagtggggctagtgccccaaggcggcttggagacctctcagcctgagggtgaagcaggagtcggggtggagagcaactccgatggggcctccccggagccctgcaccgtcacccctggtgccgtgaagctggagaaggagaagctggagcaaaacccggaggagtcccaggacatcaaagctctgcagaaagaactcgagcaatttgccaagctcctgaagcagaagaggatcaccctgggatatacacaggccgatgtgcaccctgggggttctatttgggaaggtattcagccaaacgaccatctgccgctttgaggctctgcagcttagcttcaagaacatgtgtaagctgcggcccttgctgcagaagtgggtggaggaagctgacaacaatgaaaatcttcaggagatatgcaaagcagaaaccctcgtgcaggcccgaaagagaaagcgaaccagtatcgagaaccgagtgagaggcaacctggagaatttgttcctgcagtgcccgaaacccacactgcagcagatcagccacatcgcccagcagcttgggctcgagaaggatgtggtccgagtgtggttctgtaaccggcgccagaagggcaagcgatcaagcagcgactatgcacaacgagaggattttgaggctgctgggtctcctttctcagggggaccagtgtcctttcctctggccccagggccccattttggtaccccaggctatgggagccctcacttcactgcactgtactcctcggtccctttccctgagggggaagcctttccccctgtctctgtcaccactctgggctctcccatgcattcaaactgaggtgcctgcccttctaggaatgggggacagggggaggggaggagctagggaaagaaaacctggagtttgtgccagggtttttgggattaagttcttcattcactaaggaaggaattgggaacacaaagggtgggggcaggggagtttggggcaactggttggagggaaggtgaagttcaatgatgctcttgattttaatcccacatcatgtatcacttttttcttaaataaagaagcttgggacacagtagatagacacactt

SEQ ID NO: 151 - DNA, 369 bp, Homo sapiens
atggcgggacacctggcttcagatttcgccttctcgccccctccaggtggtggaggtgatgggccaggggggccggagccgggctgggttgatcctcggacctggctaagcttccaaggccctcctggagggccaggaatcgggccgggggttgggccaggctctgaggtgtgggggattcccccatgccccccgccgtatgagttctgtggggggatggcgtactgtgggccccaggttggagtggggctagtgccccaaggcggcttggagacctctcagcctgagggtgaagcaggagtcggggtggagactccgatggggcctccccggagccctgcaccgcatccatttcctttcccactcctg

SEQ ID NO: 152 - DNA, 1395 bp, Homo sapiens
ccttcgcaagccctcatttcaccaggcccccggcttggggcgccttccttccccatggcgggacacctggcttcagattttgccttctcgccccctccaggtggtggaggtgatgggccaggggggccggagccgggctgggttgatcctcggacctggctaagcttccaaggccctcctggagggccaggaatcgggccgggggttgggccaggctctgaggtgtgggggattcccccatgccccccgccgtatgagttctgtggggggatggcgtactgtgggccccaggttggagtggggctagtgccccaaggcggcttggagacctctcagcctgagggcgaagcaggagtcggggtggagagcaactccgatggggcctccccggagccctgcaccgtcacccctggtgccgtgaagctggagaaggagaagctggagcaaaacccggaggagtcccaggacatcaaagctctgcagaaagaactcgagcaatttgccaagctcctgaagcagaagaggatcaccctgggatatacacaggccgatgtgcaccctgggggttctatttgggaaggtattcagccaaacgaccatctgccgctttgaggctctgcagcttagcttcaagaacatgtgtaagctgcggcccttgctgcagaagtgggtggaggaagctgacaacaatgaaaatcttcaggagatatgcaaagcagaaaccctcgtgcaggcccgaaagagaaagcgaaccagtatcgagaaccgagtgagaggcaacctggagaatttgttcctgcagtgcccgaaacccacactgcagcagatcagccacatcgcccagcagcttgggctcgagaaggatgtggtccgagtgtggttctgtaaccggcgccagaagggcaagcgatcaagcagcgactatgcacaacgagaggattttgaggctgctgggtctcctttctcagggggaccagtgtcctttcctctggccccagggccccattttggtaccccaggctatgggagccctcacttcactgcactgtactcctcggtccctttccctgagggggaagcctttccccctgtctctgtcaccactctgggctctcccatgcattcaaactgaggtgcctgcccttctaggaatgggggacagggggaggggaggagctagggaaagaaaacctggagtttgtgccagggtttttgggattaagttcttcattcactaaggaaggaattgggaacacaaagggtgggggcaggggagtttggggcaactggttggagggaaggtgaagttcaatgatgctcttgattttaatcccacatcatgtatcacttttttcttaaataaagaagcttgggacacagtagatagacacactt

SEQ ID NO: 153 - DNA, 1163 bp, Homo sapiens; identical to SEQ ID NO: 148

SEQ ID NO: 154 - DNA, 369 bp, Homo sapiens
atggcgggacacctggcttcagattttgccttctcgccccctccaggtggtggaggtgatgggccaggggggccggagccgggctgggttgatcctcggacctggctaagcttccaaggccctcctggagggccaggaatcgggccgggggttgggccaggctctgaggtgtgggggattcccccatgccccccgccgtatgagttctgtggggggatggcgtactgtgggccccaggttggagtggggctagtgccccaaggcggcttggagacctctcagcctgagggcgaagcaggagtcggggtggagactccgatggggcctccccggagccctgcaccgcatccatttcctttcccactcctg

SEQ ID NO: 155 - DNA, 1420 bp, Homo sapiens
agagaggggttgagtagtcccttcgcaagccctcatttcaccaggcccccggcttggggcgccttccttccccatggcgggacacctggcttcagattttgccttctcgccccctccaggtggtggaggtgatgggccaggggggccggagccgggctgggttgatcctcggacctggctaagcttccaaggccctcctggagggccaggaatcgggccgggggttgggccaggctctgaggtgtgggggattcccccatgccccccgccgtatgagttctgtggggggatggcgtactgtgggccccaggttggagtggggctagtgccccaaggcggcttggagacctctcagcctgagggcgaagcaggagtcggggtggagagcaactccgatggggcctccccggagccctgcaccgtcacccctggtgccgtgaagctggagaaggagaagctggagcaaaacccggaggagtcccaggacatcaaagctctgcagaaagaactcgagcaatttgccaagctcctgaagcagaagaggatcaccctgggatatacacaggccgatgtggggctcaccctgggggttctatttgggaaggtattcagccaaacgaccatctgccgctttgaggctctgcagcttagcttcaagaacatgtgtaagctgcggcccttgctgcagaagtgggtggaggaagctgacaacaatgaaaatcttcaggagatatgcaaagcagaaaccctcgtgcaggcccgaaagagaaagcgaaccagtatcgagaaccgagtgagaggcaacctggagaatttgttcctgcagtgcccgaaacccacactgcagcagatcagccacatcgcccagcagcttgggctcgagaaggatgtggtccgagtgtggttctgtaaccggcgccagaagggcaagcgatcaagcagcgactatgcacaacgagaggattttgaggctgctgggtctcctttctcagggggaccagtgtcctttcctctggccccagggccccattttggtaccccaggctatgggagccctcacttcactgcactgtactcctcggtccctttccctgagggggaagcctttccccctgtctctgtcaccactctgggctctcccatgcattcaaactgaggtgcctgcccttctaggaatgggggacagggggaggggaggagctagggaaagaaaacctggagtttgtgccagggtttttgggattaagttcttcattcactaaggaaggaattgggaacacaaagggtgggggcaggggagtttggggcaactggttggagggaaggtgaagttcaatgatgctcttgattttaatcccacatcatgtatcacttttttcttaaataaagaagcttgggacacagtagatagacacactta

SEQ ID NO: 156 - DNA, 1163 bp, Homo sapiens; identical to SEQ ID NO: 148

SEQ ID NO: 157 - DNA, 1420 bp, Homo sapiens; identical to SEQ ID NO: 149

SEQ ID NO: 158 - DNA, 1395 bp, Homo sapiens; identical to SEQ ID NO: 150

SEQ ID NO: 159 - DNA, 369 bp, Homo sapiens; identical to SEQ ID NO: 151

SEQ ID NO: 160 - DNA, 1395 bp, Homo sapiens; identical to SEQ ID NO: 152

SEQ ID NO: 161 - DNA, 369 bp, Homo sapiens; identical to SEQ ID NO: 154

SEQ ID NO: 162 - DNA, 1420 bp, Homo sapiens; identical to SEQ ID NO: 155

SEQ ID NO: 163 - DNA, 1163 bp, Homo sapiens; identical to SEQ ID NO: 148

SEQ ID NO: 164 - DNA, 1395 bp, Homo sapiens; identical to SEQ ID NO: 144

SEQ ID NO: 165 - DNA, 1163 bp, Homo sapiens; identical to SEQ ID NO: 145

SEQ ID NO: 166 - DNA, 1420 bp, Homo sapiens; identical to SEQ ID NO: 146

SEQ ID NO: 167 - DNA, 369 bp, Homo sapiens; identical to SEQ ID NO: 147

SEQ ID NO: 168 - DNA, 4108 bp, Homo sapiens
ccggccgtctatgctccaggccctctcctcgcggtgccggtgaacccgccagccgccccgatgtacagcatgatgatggagaccgacctgcactcgcccggcggcgcccaggcccccacgaacctctcgggccccgccggggcgggcggcggcgggggcggaggcgggggcggcggcggcggcgggggcgccaaggccaaccaggaccgggtcaaacggcccatgaacgccttcatggtgtggtcccgcgggcagcggcgcaagatggcccaggagaaccccaagatgcacaactcggagatcagcaagcgcctgggggccgagtggaaggtcatgtccgaggccgagaagcggccgttcatcgacgaggccaagcggctgcgcgcgctgcacatgaaggagcacccggattacaagtaccggccgcgccgcaagaccaagacgctgctcaagaaggacaagtactcgctggccggcgggctcctggcggccggcgcgggtggcggcggcgcggctgtggccatgggcgtgggcgtgggcgtgggcgcggcggccgtgggccagcgcctggagagcccaggcggcgcggcgggcggcggctacgcgcacgtcaacggctgggccaacggcgcctaccccggctcggtggcggcggcggcggcggccgcggccatgatgcaggaggcgcagctggcctacgggcagcacccgggcgcgggcggcgcgcacccgcacgcgcaccccgcgcacccgcacccgcaccacccgcacgcgcacccgcacaacccgcagcccatgcaccgctacgacatgggcgcgctgcagtacagccccatctccaactcgcagggctacatgagcgcgtcgccctcgggctacggcggcctcccctacggcgccgcggccgccgccgccgccgctgcgggcggcgcgcaccagaactcggccgtggcggcggcggcggcggcggcggccgcgtcgtcgggcgccctgggcgcgctgggctctctggtgaagtcggagcccagcggcagcccgcccgccccagcgcactcgcgggcgccgtgccccggggacctgcgcgagatgatcagcatgtacttgcccgccggcgaggggggcgacccggcggcggcagcagcggccgcggcgcagagccggctgcactcgctgccgcagcactaccagggcgcgggcgcgggcgtgaacggcacggtgcccctgacgcacatctagcgccttcgggacgccggggactctgcggcggcgacccacgagctcgcggcccgcgcccggctcccgccccgccccggcgcggcgtggcttttgtacagacgttcccacattcttgtcaaaaggaaaatactggagacgaacgccgggtgacgcgtgtcccccactcaccttccccggagaccctggcgaccgccgggcgctgacaccagacttgggttttagactgaacttcggtgttttcttgagactttttgtacagtatttatcacctacggaggaagcggaaagcgttttctttgctcgaggggacaaaaaagtcaaaacgaggcgagaggcgaagcccacttttgtataccggccggcgcgctcactttcctccgcgttgcttccggacggcgccgaccgccggagcccaagtgacgcggagctcgtcgcatttgttataaatgtagtaaggcaggtccaagcacttacaagttttttgtagttgttaccgctcttttgggttggtttgttaatttatacaaagagattaccaccaccaccccctccttcagacggcggagttatattctgggttttgtaaaactttatgtatctgagcatttccatttttttttttgggttttgtattatttcttgtaaatgcattgtgaaaaattttattttcggcgttgcaatgcggggaggagaagtcagattatgtacatagttttctaaaaagcctttcttctaaaaacgaaaaaagaccccccacccaaaatgtttcgagtcaacaaatttaagagacagagcccattttctccataaatttgtaacatgctatttttatgtgcatgttttatgagttcaaaatgcaatgaggaaatctgacagggaaattatctgtatgaactaaaagtaagggaaccccggggaatgggaggacaggatttttcaaggaacctttttcaatgaaagagaaggaagttaaaacctataggttattttgtagagctgagtgttaatacgggccgagaaataaaagtatcttctgctccggctgtttcactgcggacggctggggctgctgcgcgttaccttgctgcaagcggggcgccttccacctggctgggggtctgcgccacagtttggtccagaggagggaggaggaagggaagaccccagtggtgggaccctggaccaggccatggatgaaggacaaagaccagggcaggtcacgggtttcccaattccccagcaattaagatttcgagcagaatttatctaaatgtgtttcaaggaaacacaatcgctgaaccaaaacgtactgcagccgagccccctccgtccatcctctgcccctccccctggcttctttctcttgggaaaacgggcaaaataattgtgctggattctcacacacacagaaatatcgaccatcaccctcccccgcgtgaactgggatgcaagttgctaaccgatgtgaacgcaaaatgccttgttcattattcctgacgagatcttgaggttgtttgatgctttaaattttttaattatattattttctaggtgtttattggtacattgcagttttttttttgaaatttaaaaatttctgtaaaactttgtcttcaagtaatctgacagcattaaatattgcatttaaaaattatactgtagcaaatacatttaaaaattaatcacaacgttaagatgaaattatatttttggaaaaaaaaaacacttgaagcccagatggaaatacgtttatttcagcagccttaggtttcccctcgctttctcaacacccttccttgtcctggagtatggactgtccgtccaaaagtgagcctatgctataagtttaatgagaaccgaattcagcctgcattcgagaatagctttaagtataatgctgatctgacaattgacgtgtaatttgggaagtcattttgataattttgcttaaaccactcattcgttaaagtgattacaaaaaagttcaagaatgatgtccactgctttctaacaagataataaaccccccccctcttttctttttctttatttttatttcttttagctatttgatcctttctgaagcagttgtttctggaagagtctgtgcgcccatggatggctgagcaccactacgacttagtccgggataagggcctccccagtcctctccgggagatgatttgggaaattttataatgcttgttctgttaactcaccgggaccttgagggtccaatgggaccttgagggttttctctgaaatatacaaacttaaaggactctctctgaggttctttgactgacgtccactctcagtctggcccctgtgctcccctgtgtgtaccctggagtttctgtgtccaattgttggcatctaggtcttggctcaagattaggatgtgggccccactttagaggcacagactatgaaaagctgagttagtgcgcccgggacgccaggcaagcagcttttacagtttggcatcttattgcaggtgcttcgtgcacagtcagctgaaatagccaatgccaggtgctccaaccaccttatttccttgttttgttgattagaacaacacagaaaaaagcaaatataaatttttaatgactccatttaaaaatatcacagggtgggggcaaggaaattagctgagattcatctcaggattgagattctatccccccttccccgcccccagcagtgtcgctccaattcaaattagtggagaaaagattacagtaggccctgagccgactgtgaattcggtgcttggccaaggtaacactcatcgtattcacggagtgaaatactatatgatgatagttattatattatatgacgacttcattcacttcccaaatcacagggt

SEQ ID NO: 169 - DNA, 2500 bp, Homo sapiens
ctattaacttgttcaaaaaagtatcaggagttgtcaaggcagagaagagagtgtttgcaaaagggggaaagtagtttgctgcctctttaagactaggactgagagaaagaagaggagagagaaagaaagggagagaagtttgagccccaggcttaagcctttccaaaaaataataataacaatcatcggcggcggcaggatcggccagaggaggagggaagcgctttttttgatcctgattccagtttgcctctctctttttttcccccaaattattcttcgcctgattttcctcgcggagccctgcgctcccgacacccccgcccgcctcccctcctcctctccccccgcccgcgggccccccaaagtcccggccgggccgagggtcggcggccgccggcgggccgggcccgcgcacagcgcccgcatgtacaacatgatggagacggagctgaagccgccgggcccgcagcaaacttcggggggcggcggcggcaactccaccgcggcggcggccggcggcaaccagaaaaacagcccggaccgcgtcaagcggcccatgaatgccttcatggtgtggtcccgcgggcagcggcgcaagatggcccaggagaaccccaagatgcacaactcggagatcagcaagcgcctgggcgccgagtggaaacttttgtcggagacggagaagcggccgttcatcgacgaggctaagcggctgcgagcgctgcacatgaaggagcacccggattataaataccggccccggcggaaaaccaagacgctcatgaagaaggataagtacacgctgcccggcgggctgctggcccccggcggcaatagcatggcgagcggggtcggggtgggcgccggcctgggcgcgggcgtgaaccagcgcatggacagttacgcgcacatgaacggctggagcaacggcagctacagcatgatgcaggaccagctgggctacccgcagcacccgggcctcaatgcgcacggcgcagcgcagatgcagcccatgcaccgctacgacgtgagcgccctgcagtacaactccatgaccagctcgcagacctacatgaacggctcgcccacctacagcatgtcctactcgcagcagggcacccctggcatggctcttggctccatgggttcggtggtcaagtccgaggccagctccagcccccctgtggttacctcttcctcccactccagggcgccctgccaggccggggacctccgggacatgatcagcatgtatctccccggcgccgaggtgccggaacccgccgcccccagcagacttcacatgtcccagcactaccagagcggcccggtgcccggcacggccattaacggcacactgcccctctcacacatgtgagggccggacagcgaactggaggggggagaaattttcaaagaaaaacgagggaaatgggaggggtgcaaaagaggagagtaagaaacagcatggagaaaacccggtacgctcaaaaagaaaaaggaaaaaaaaaaatcccatcacccacagcaaatgacagctgcaaaagagaacaccaatcccatccacactcacgcaaaaaccgcgatgccgacaagaaaacttttatgagagagatcctggacttctttttgggggactatttttgtacagagaaaacctggggagggtggggagggcgggggaatggaccttgtatagatctggaggaaagaaagctacgaaaaactttttaaaagttctagtggtacggtaggagctttgcaggaagtttgcaaaagtctttaccaataatatttagagctagtctccaagcgacgaaaaaaatgttttaatatttgcaagcaacttttgtacagtatttatcgagataaacatggcaatcaaaatgtccattgtttataagctgagaatttgccaatatttttcaaggagaggcttcttgctgaattttgattctgcagctgaaatttaggacagttgcaaacgtgaaaagaagaaaattattcaaatttggacattttaattgtttaaaaattgtacaaaaggaaaaaattagaataagtactggcgaaccatctctgtggtcttgtttaaaaagggcaaaagttttagactgtactaaattttataacttactgttaaaagcaaaaatggccatgcaggttgacaccgttggtaatttataatagcttttgttcgatcccaactttccattttgttcagataaaaaaaaccatgaaattactgtgtttgaaatattttcttatggtttgtaatatttctgtaaatttattgtgatattttaaggttttcccccctttattttccgtagttgtattttaaaagattcggctctgtattatttgaatcagtctgccgagaatccatgtatatatttgaactaatatcatccttataacaggtacattttcaacttaagtttttactccattatgcacagtttgagataaataaatttttgaaatatggacactg

SEQ ID NO: 170 - DNA, 1318 bp, Homo sapiens
atggttgtctattaacttgttcaaaaaagtatcaggagttgtcaaggcagagaagagagtgtttgcaaaagggggaaagtagtttgctgcctctttaagactaggactgagagaaagaagaggagagagaaagaaagggagagaagtttgagccccaggcttaagcctttccaaaaaataataataacaatcatcggcggcggcaggatcggccagaggaggagggaagcgctttttttgatcctgattccagtttgcctctctctttttttcccccaaattattcttcgcctgattttcctcgcggagccctgcgctcccgacacccccccgccggcgggccgggcccgcgcacagcgcccgcatgtacaacatgatggagacggagctgaagccgccgggcccgcagcaaacttcggggggcggcggcggcaactccaccgcggcggcggccggcggcaaccagaaaaacagcccggaccgcgtcaagcggcccatgaatgccttcatggtgtggtcccgcgggcagcggcgcaagatggcccaggagaaccccaagatgcacaactcggagatcagcaagcgcctgggcgccgagtggaaacttttgtcggagacggagaagcggccgttcatcgacgaggctaagcggctgcgagcgctgcacatgaaggagcacccggattataaataccggccccggcggaaaaccaagacgctcatgaagaaggataagtacacgctgcccggcgggctgctggcccccggcggcaatagcatggcgagcggggtcggggtgggcgccggcctgggcgcgggcgtgaaccagcgcatggacagttacgcgcacatgaacggctggagcaacggcagctacagcatgatgcaggaccagctgggctacccgcagcacccgggcctcaatgcgcacggcgcagcgcagatgcagcccatgcaccgctacgacgtgagcgccctgcagtacaactccatgaccagctcgcagacctacatgaacggctcgcccacctacagcatgtcctactcgcagcagggcacccctggcatggctcttggctccatgggttcggtggtcaagtccgaggccagctccagcccccctgtggttacctcttcctcccactccagggcgccctgccaggccggggacctccgggacatgatcagcatgtatctccccggcgccgaggtgccggaacccgccgcccccagcagacttcacatgtcccagcactaccagagcggcccggtgcccggcacggccattaacggcacactgcccctctcacacatgtga

SEQ ID NO: 171 - DNA, 2074 bp, Homo sapiens
atgcgacctgttcgagagaactcatcaggtgcgagaagcccgcgggttcctgctgatttggcgcggagcattttgataagcctacccttcccgccggactcgctggcccacaggcccccaagctccgctccgacggagtcccagggccttttcaccgtggccgctccagccccgggagcgccttctcctcccgccacgctggcgcaccttcttcccgccccggcaatgtacagccttctggagactgaactcaagaaccccgtagggacacccacacaagcggcgggcaccggcggccccgcagccccgggaggcgcaggcaagagtagtgcgaacgcagccggcggcgcgaactcgggcggcggcagcagcggtggtgcgagcggaggtggcgggggtacagaccaggaccgtgtgaaacggcccatgaacgccttcatggtatggtcccgcgggcagcggcgcaaaatggccctggagaaccccaagatgcacaattctgagatcagcaagcgcttgggcgccgactggaaactgctgaccgacgccgagaagcgaccattcatcgacgaggccaagcgacttcgcgccgtgcacatgaaggagtatccggactacaagtaccgaccgcgccgcaagaccaagacgctgctcaagaaagataagtactccctgcccagcggcctcctgcctcccggtgccgcggccgccgccgccgctgccgcggccgcagccgctgccgccagcagtccggtgggcgtgggccagcgcctggacacgtacacgcacgtgaacggctgggccaacggcgcgtactcgctggtgcaggagcagctgggctacgcgcagcccccgagcatgagcagcccgccgccgccgcccgcgctgccgccgatgcaccgctacgacatggccggcctgcagtacagcccaatgatgccgcccggcgctcagagctacatgaacgtcgctgccgcggccgccgccgcctcgggctacgggggcatggcgccctcagccacagcagccgcggccgccgcctacgggcagcagcccgccaccgccgcggccgcagctgcggccgcagccgccatgagcctgggccccatgggctcggtagtgaagtctgagcccagctcgccgccgcccgccatcgcatcgcactctcagcgcgcgtgcctcggcgacctgcgcgacatgatcagcatgtacctgccacccggcggggacgcggccgacgccgcctctccgctgcccggcggtcgcctgcacggcgtgcaccagcactaccagggcgccgggactgcagtcaacggaacggtgccgctgacccacatctgagcaccggcctgcgctcgtccacccttgttccccacccccacccccactcccgccccgcacccccaagttgggacgccttgtttagctttgcttgcctgggactgttgccttgtaccgatgatggggagggctgaaagttttgctgtagctgtcgggttttgtacaaaagcaaaaataagtcaggagcagcgaaaatgggacttctagagagctctcttgccccacgccgctgctcctttcacctttgtaggctgggaatcgctgtgttatttgcaaagaaaaaacagcccccactcctcctcctgagttccagggttattctgttacatttgaaaatgttgtcttgttagtttgcagttagccaaggagtgaatgggagaaacatagtatcgggtgaggccagctggagaactgcaacgcctacgcccccagtcgtgtcgcgtctgttttcctcgtggttttttggggcgctgaccgctccaagcagcgcggcagctaaagccaatgttaatttatagccaggtgtgcgtgtgtctcccgcctcgccgcccctggccgcgggacagcttctgtccaatcatgttgagttggtgatttctgccgtgatctgtttgatatttcttcgcgctaatgtgttcagatttcgtttgggtagtggggaggggctactttgtttcagggttttcaagcttttactcttaattcctaaatgagatcaataaattttataacc

SEQ ID NO: 172 - DNA, 1048 bp, Homo sapiens
gggagaggtctggcctatccgcgcctggcagctgtcggaactccggagaccacaaaggggtttatggtttaccccctccacggaaggatcgacgcttcacgttgaggggagggcattcaggacgccctcttaaggcttctcccaacccatggcgctaccaggctcctcacaggaccaggcctggagcctggagcctccggctgccacggctgctgcctcctcatcttcgggaccccaggagcgggagggcgctgggagccccgcggcccccgggacgctgcccctggagaaggtgaagcggccgatgaacgcgttcatggtgtggagctccgctcagcgccgccagatggcgcagcagaaccccaagatgcacaactccgagatctccaagcgcctgggcgcgcagtggaagctgctggacgaggacgagaagcggcccttcgtggaggaggccaagcggctccgcgcccgacacctgcgcgactaccccgactacaagtaccggcctcggcgcaaggccaagagctcgggcgccggaccttcccgctgcggacagggaagaggcaacctggccagcggcggcccgctctgggggccggggtacgcgaccacccaaccgagcagaggctttgggtacagaccccccagctactcgacagcctacctgcctggcagctatggctcttcccactgcaaactggaagccccctcaccgtgctccctccctcagagtgaccctaggctccagggggaactgctgcccacctatacccactacctgccccctggctctcccactccatacaaccctccccttgctggtgcccccatgcccctaacccacctctaaccctcatggacgcagacctcacgggacgggcctcatcctccttttttaatccagcagcatcccctaccccaggctgtcaaccctttctcctgttggactacagttcagaggcagcctgcagtcctcccatgatagccagggagagccgcacaacatacaattatatttttggtagtattaaacagttttgtattattc

SEQ ID NO: 173 - DNA, 1723 bp, Homo sapiens
ccaccgccgtccccaccgccatccgccctcccggcctggcctgcccttgcgcccggctccccagtgcccgccgcccgcccgccgcgctcccgcgctccgttccgcccaggccgcgcccagctggaatgcagagatcgccgcccggctacggcgcacaggacgacccgcccgcccgccgcgactgtgcatgggccccgggacacggggccgccgctgacacgcgcggcctcgccgccggccccgccgccctcgccgcgcccgccgcgcccgcctcgccgcccagcccgcagcgcagtcccccgcgcagccccgagccggggcgctatggcctcagcccggccggccgcggggaacgccaggcggcagacgagtcgcgcatccggcggcccatgaacgccttcatggtgtgggcaaaggacgagcgcaagcggctggctcagcagaacccggacctgcacaacgcggtgctcagcaagatgctgggcaaagcgtggaaggagctgaacgcggcggagaagcggcccttcgtggaggaagccgaacggctgcgcgtgcagcacttgcgcgaccaccccaactacaagtaccggccgcgccgcaagaagcaggcgcgcaaggcccggcggctggagcccggcctcctgctcccgggattagcgcccccgcagccaccgcccgagcctttccccgcggcgtctggctcggctcgcgccttccgcgagctgcccccgctgggcgccgagttcgacggcctggggctgcccacgcccgagcgctcgcctctggacggcctggagcccggcgaggctgccttcttcccaccgcccgcggcgcccgaggactgcgcgctgcggcccttccgcgcgccctacgcgcccaccgagttgtcgcgggaccccggcggttgctacggggctcccctggcggaggcgctcaggaccgcgccccccgcggcgccgctcgctggcctgtactacggcaccctgggcacgcccggcccgtaccccggcccgctgtcgccgccgcccgaggccccgccgctggagagcgccgagccgctggggcccgccgccgatctgtgggccgacgtggacctcaccgagttcgaccagtacctcaactgcagccggactcggcccgacgcccccgggctcccgtaccacgtggcactggccaaactgggcccgcgcgccatgtcctgcccagaggagagcagcctgatctccgcgctgtcggacgccagcagcgcggtctattacagcgcgtgcatctccggctaggccgccggcgccgcccgggtccctgcagcgcttcctcccgcagcccccgcgaccgatccgaccgcgtcgctgccgctctgctctctcatacgcgtgtatgtttggttccatgtcacagccccctaggagccagtgatgctcggccttgcgcccgttccacctcccaggccacccttcctgggcttctgggccacctgccctcggggggcccctgcgagggtgcctggagttcccacgtgtcccggggcttttccaggaagcccgagcccaggacctgttggcagagttgccagggttacatttttgaagcacctgctccttttcttgcagtgtattttctacaaccagattgtattaatattttttactttgcccttttaaaaaatatacctaatacaatatatttaatttttaattaaactcttaaacttttcttccaagaa

SEQ ID NO: 174 - DNA, 2101 bp, Homo sapiens
ttcattataaatctagagactccaggattttaacgttctgctggactgagctggttgcctcatgttattatgcaggcaactcactttatcccaatttcttgatacttttccttctggaggtcctatttctctaacatcttccagaaaagtcttaaagctgccttaaccttttttccagtccacctcttaaattttttcctcctcttcctctatactaacatgagtgtggatccagcttgtccccaaagcttgccttgctttgaagcatccgactgtaaagaatcttcacctatgcctgtgatttgtgggcctgaagaaaactatccatccttgcaaatgtcttctgctgagatgcctcacacggagactgtctctcctcttccttcctccatggatctgcttattcaggacagccctgattcttccaccagtcccaaaggcaaacaacccacttctgcagagaagagtgtcgcaaaaaaggaagacaaggtcccggtcaagaaacagaagaccagaactgtgttctcttccacccagctgtgtgtactcaatgatagatttcagagacagaaatacctcagcctccagcagatgcaagaactctccaacatcctgaacctcagctacaaacaggtgaagacctggttccagaaccagagaatgaaatctaagaggtggcagaaaaacaactggccgaagaatagcaatggtgtgacgcagaaggcctcagcacctacctaccccagcctttactcttcctaccaccagggatgcctggtgaacccgactgggaaccttccaatgtggagcaaccagacctggaacaattcaacctggagcaaccagacccagaacatccagtcctggagcaaccactcctggaacactcagacctggtgcacccaatcctggaacaatcaggcctggaacagtcccttctataactgtggagaggaatctctgcagtcctgcatgcagttccagccaaattctcctgccagtgacttggaggctgccttggaagctgctggggaaggccttaatgtaatacagcagaccactaggtattttagtactccacaaaccatggatttattcctaaactactccatgaacatgcaacctgaagacgtgtgaagatgagtgaaactgatattactcaatttcagtctggacactggctgaatccttcctctcccctcctcccatccctcataggatttttcttgtttggaaaccacgtgttctggtttccatgatgcccatccagtcaatctcatggagggtggagtatggttggagcctaatcagcgaggtttctttttttttttttttcctattggatcttcctggagaaaatactttttttttttttttttttgaaacggagtcttgctctgtcgcccaggctggagtgcagtggcgcggtcttggctcactgcaagctccgtctcccgggttcacgccattctcctgcctcagcctcccgagcagctgggactacaggcgcccgccacctcgcccggctaatattttgtatttttagtagagacggggtttcactgtgttagccaggatggtctcgatctcctgaccttgtgatccacccgcctcggcctccctaacagctgggatttacaggcgtgagccaccgcgccctgcctagaaaagacattttaataaccttggctgccgtctctggctatagataagtagatctaatactagtttggatatctttagggtttagaatctaacctcaagaataagaaatacaagtacaaattggtgatgaagatgtattcgtattgtttgggattgggaggctttgcttattttttaaaaactattgaggtaaagggttaagctgtaacatacttaattgatttcttaccgtttttggctctgttttgctatatcccctaatttgttggttgtgctaatctttgtagaaagaggtctcgtatttgctgcatcgtaatgacatgagtactgctttagttggtttaagttcaaatgaatgaaacaactatttttcctttagttgattttaccctgatttcaccgagtgtttcaatgagtaaatatacagcttaaacat

SEQ ID NO: 175 - DNA, 870 bp, Homo sapiens
atgagtgtggatccagcttgtccccaaagcttgccttgctttgaagcatccgactgtaaagaatcttcacctatgcctgtgatttgtgggcctgaagaaaactatccatccttgcaaatgtcttctgctgagatgcctcacacggagactgtctctcctcttccttcctccatggatctgcttattcaggacagccctgattcttccaccagtcccaaaggcaaacaacccacttctgcagagaagagtgtcgcaaaaaaggaagacaaggtcccggtcaagaaacagaagaccagaactgtgttctcttccacccagctgtgtgtactcaatgatagatttcagagacagaaatacctcagcctccagcagatgcaagaactctccaacatcctgaacctcagctacaaacaggtgaagacctggttccagaaccagagaatgaaatctaagaggtggcagaaaaacaactggccgaagaatagcaatggtgtgacgcagggatgcctggtgaacccgactgggaaccttccaatgtggagcaaccagacctggaacaattcaacctggagcaaccagacccagaacatccagtcctggagcaaccactcctggaacactcagacctggtgcacccaatcctggaacaatcaggcctggaacagtcccttctataactgtggagaggaatctctgcagtcctgcatgcagttccagccaaattctcctgccagtgacttggaggctgccttggaagctgctggggaaggccttaatgtaatacagcagaccactaggtattttagtactccacaaaccatggatttattcctaaactactccatgaacatgcaacctgaagacgtgtga

SEQ ID NO: 176 - DNA, 1615 bp, Homo sapiens
tcagagttcacgaggcagccgaggaagaggaggcttgaggcccagggtgggcaccagccagccatggccacagccgagaccgccttgccctccatcagcacactgaccgccctgggccccttcccggacacacaggatgacttcctcaagtggtggcgctccgaagaggcgcaggacatgggcccgggtcctcctgaccccacggagccgcccctccacgtgaagtctgaggaccagcccggggaggaagaggacgatgagaggggcgcggacgccacctgggacctggatctcctcctcaccaacttctcgggcccggagcccggtggcgcgccccagacctgcgctctggcgcccagcgaggcctccggggcgcaatatccgccgccgcccgagactctgggcgcatatgctggcggcccggggctggtggctgggcttttgggttcggaggatcactcgggttgggtgcgccctgccctgcgagcccgggctcccgacgccttcgtgggcccagccctggctccagccccggcccccgagcccaaggcgctggcgctgcaaccggtgtacccggggcccggcgccggctcctcgggtggctacttcccgcggaccgggctttcagtgcctgcggcgtcgggcgccccctacgggctactgtccgggtaccccgcgatgtacccggcgcctcagtaccaagggcacttccagctcttccgcgggctccagggacccgcgcccggtcccgccacgtccccctccttcctgagttgtttgggacccgggacggtgggcactggactcggggggactgcagaggatccaggtgtgatagccgagaccgcgccatccaagcgaggccgacgttcgtgggcgcgcaagaggcaggcagcgcacacgtgcgcgcacccgggttgcggcaagagctacaccaagagctcccacctgaaggcgcatctgcgcacgcacacaggggagaagccatacgcctgcacgtgggaaggctgcggctggagattcgcgcgctcggacgagctgacccgccactaccggaaacacacggggcagcgccccttccgctgccagctctgcccacgtgctttttcgcgctctgaccacctggccttgcacatgaagcgccacctttgagccctgccctggcacttggactctcctagtgactggggatgggacaagaagcctgtttggtggtctcttcacacggacgcgcgtgacacaatgctgggtggttttcccacgaatggaccctctcctggactcgcgttcccaaagatccacccaaatatcaaacacggacccatagacagccctgggggagcctcttacggaaaatccgacaagccttcagccacagggagccacacagagatgtccaaactgtcgtgcaaacccagtgagacagaccgccaaataaacggactcagtggacactcagaccagctcccagatggccctggacagcaggagagggtgtgggatgaggcttcccagagaccctgggtctagaaagcggctcctgaaggtcccttattgtggctgatattaactgtcaatggttatgggtcctataaaaatgcccctcccagataaa

SEQ ID NO: 177 - DNA, 1647 bp, Homo sapiens
gcccgcccgcgccccgaccagcccggcctcgggcagccactcaccggtgtccccgtccgcgtcctttctccccgggtcccggccatggcgctgagtgaacccatcctgccgtccttctccactttcgccagcccgtgccgcgagcgcggcctgcaggagcgctggccgcgcgccgaacccgagtccggcggcaccgacgacgacctcaacagcgtgctggacttcatcctgtccatggggctggatggcctgggcgccgaggccgccccggagccgccgccgccgcccccgccgcctgcgttctattaccccgaacccggcgcgcccccgccctacagcgcccccgcgggtggcctggtgtctgagctgctgcgacccgagctggatgcgccgctggggcccgcactgcacggccgctttctgctggcgccgcccggccgcctggtcaaggccgagccccctgaagcggacggcggcggcggctacggctgcgcccccgggctgacccgtggaccgcgcggcctcaagcgcgagggcgccccgggcccggcggcttcgtgcatgcgaggtcccgggggccgccccccgccgccgcccgacacaccgccgctcagccccgacggccccgcgcgcctgcccgcgcccggtccgcgcgcctccttcccgccgcctttcggtggccctggtttcggcgcgcccgggcccggcctgcattacgcgccgcctgcgcccccagccttcggtctcttcgacgacgcggccgccgccgcggcagccctgggcctggcgccccccgccgcccgcggtctcctcacgccgcctgcgtccccgctggagctgctggaggccaagccaaagcgcggccgccgctcttggccccgcaaacgcaccgccactcacacctgcagctacgcgggctgcggcaagacctacaccaagagttcgcatctgaaggcgcatctgcgcacgcacacaggtgagaagccctaccactgcaactgggacggctgcggctggaagtttgcgcgctcagacgagctcacgcgccactaccgaaagcacacgggccaccggccattccagtgccatctgtgcgatcgtgccttctcgcgctccgatcacctggcgctgcacatgaaacggcacatgtagccgggacgcccccgcccacctgcgcgcggccgtggcgggtcccacgcgccgggcgcggccccctcccaaactgtgactggtatttattggacccagagaaccgggccgggcacagcgtggctacagagggtctccctcgatgacgacgacgacgacgccaccaccccagcccccgtctgtgactgaaggcccggtgggaaaagaccacgatcctccttgacgagttttgtttttcaaaatggtgcaataatttaagtggcatcttctctcccaccgggtctacactagaggatcgaggcttgtgatgccttgtgagaaataagggccttaatttgtactgtctgcggcattttttataatattgtatatagtgactgacaaatattgtattactgtacatagagagacaggtgggcatttttgggctacctggttcgtttttataagattttgctgggttggttttttttttaattaaaaagttttgcatctttt

SEQ ID NO: 178 - DNA, 800 bp, Homo sapiens
gaggaccggtgggacgcgccggaacgacggccgaaagccgcccctgactctcctgtctccgctccctgccttgctcgcaggcagccacctggcgagtctgacatggctgtcagcgacgcgctgctcccatctttctccacgttcgcgtctggcccggcgggaagggagaagacactgcgtcaagcaggtgccccgaataaccgctggcgggaggagctctcccacatgaagcgacttcccccagtgcttcccggccgcccctatgacctggcggcggcgaccgtggccacagacctggagagcggcggagccggtgcggcttgcggcggtagcaacctggcgcccctacctcggagagagaccgaggagttcaacgatctcctggacctggactttattctctccaattcgctgacccatcctccggagtcagtggccgccaccgtgtcctcgtcagcgtcagcctcctcttcgtcgtcgccgtcgagcagcggccctgccagcgcgccctccacctgcagcttcacctatccgatccgggccgggaacgacccgggcgtggcgccgggcggcacgggcggaggcctcctctatggcagggagtccgctccccctccgacggctcccttcaacctggcggacatcaacgacgtgagcccctcgggcggcttcgtggccgagctcctgcggccagaattggacccggtgtacattccgccgcagcagccgcagccgccaggtggcgggctgatgggcaagttcgtgctgaaggcgtcgctgagcgcccctggcagcgagta

SEQ ID NO: 179 - DNA, 545 bp, Homo sapiens
ggcagtttcccgaccagagagaacgaacgtgtctgcgggcgcgcggggagcagaggcggtggcgggcggcggcggcaccgggagccgccgagtgaccctcccccgcccctctggccccccaccctcccacccgccgcgaccgcgacagtggtgggggacgctgctgagtggaagagagcgcagcccggccaccggacctacttactcgccttgctgattgtctatttttgcgtttacaacttttctaagaacttttgtatacaaaggaactttttaaaaaagacgcttccaagttatatttaatccaaagaagaaggatctcggccaatttggggttttgggttttggcttcgtttcttctcttcgttgactttggggttcaggtgccccagctgcttcgggctgccgaggaccttctgggcccccacattaatgaggcagccacctggcgagtctgacatggctgtcagcgacgcgctgctcccatctttctccacgttcgcgtctggcccggcgggaagggagaagacactgcgtcaagcagg

SEQ ID NO: 180 - DNA, 822 bp, Homo sapiens
actcctctggccttctcttgaggctcccagttcacgctgcacagtgctgggcactgcctcctctccacacccctagcgccccccacccctcagcagaagggcccgcgaggaaccgtgcgaggtcaggccgagcgccggcaccgccaccggcactggcgctgagcgacgagagcggactcctgcgagcgcagagagggagggggagatggagggctggatgagtcacgcggataatcgcgctcttctccagcgcgcagacagcgcggcaagcgcgtatgctagcaggggtgcggacgcgtgaccgtgccgcccgctgaccccaccagtcttcgcgggcttcgaacccagggagccgacaatggcgttcgcagctccgcgccacggcagccagtctcacctggcggcaccgcccgcccaccgccccggccacagcccctgcgcccacggcagcactcgaggcgaccgcgacagtggtgggggacgctgctgagtggaagagagcgcagcccggccaccggacctacttactcgccttgctgattgtctatttttgcgtttacaacttttctaagaacttttgtatacaaaggaactttttaaaaaagacgcttccaagttatatttaatccaaagaagaaggatctcggccaatttggggttttgggttttggcttcgtttcttctcttcgttgactttggggttcaggtgccccagctgcttcgggctgccgaggaccttctgggcccccacattaatgaggcagccacctggcgagtctgacatggctgtcagcgacgcgctgctcccatctttctccacgt

SEQ ID NO: 181 - DNA, 2813 bp, Homo sapiens
ctcccacccgcccgtggcccgcgcccatggccgcgcgcgctccacacaactcaccggagtccgcgccttgcgccgccgaccagttcgcagctccgcgccacggcagccagtctcacctggcggcaccgcccgcccaccgccccggccacagcccctgcgcccacggcagcactcgaggcgaccgcgacagtggtgggggacgctgctgagtggaagagagcgcagcccggccaccggacctacttactcgccttgctgattgtctatttttgcgtttacaacttttctaagaacttttgtatacaaaggaactttttaaaaaagacgcttccaagttatatttaatccaaagaagaaggatctcggccaatttggggttttgggttttggcttcgtttcttctcttcgttgactttggggttcaggtgccccagctgcttcgggctgccgaggaccttctgggcccccacattaatgaggcagccacctggcgagtctgacatggctgtcagcgacgcgctgctcccatctttctccacgttcgcgtctggcccggcgggaagggagaagacactgcgtcaagcaggtgccccgaataaccgctggcgggaggagctctcccacatgaagcgacttcccccagtgcttcccggccgcccctatgacctggcggcggcgaccgtggccacagacctggagagcggcggagccggtgcggcttgcggcggtagcaacctggcgcccctacctcggagagagaccgaggagttcaacgatctcctggacctggactttattctctccaattcgctgacccatcctccggagtcagtggccgccaccgtgtcctcgtcagcgtcagcctcctcttcgtcgtcgccgtcgagcagcggccctgccagcgcgccctccacctgcagcttcacctatccgatccgggccgggaacgacccgggcgtggcgccgggcggcacgggcggaggcctcctctatggcagggagtccgctccccctccgacggctcccttcaacctggcggacatcaacgacgtgagcccctcgggcggcttcgtggccgagctcctgcggccagaattggacccggtgtacattccgccgcagcagccgcagccgccaggtggcgggctgatgggcaagttcgtgctgaaggcgtcgctgagcgcccctggcagcgagtacggcagcccgtcggtcatcagcgtcagcaaaggcagccctgacggcagccacccggtggtggtggcgccctacaacggcgggccgccgcgcacgtgccccaagatcaagcaggaggcggtctcttcgtgcacccacttgggcgctggaccccctctcagcaatggccaccggccggctgcacacgacttccccctggggcggcagctccccagcaggactaccccgaccctgggtcttgaggaagtgctgagcagcagggactgtcaccctgccctgccgcttcctcccggcttccatccccacccggggcccaattacccatccttcctgcccgatcagatgcagccgcaagtcccgccgctccattaccaagagctcatgccacccggttcctgcatgccagaggagcccaagccaaagaggggaagacgatcgtggccccggaaaaggaccgccacccacacttgtgattacgcgggctgcggcaaaacctacacaaagagttcccatctcaaggcacacctgcgaacccacacaggtgagaaaccttaccactgtgactgggacggctgtggatggaaattcgcccgctcagatgaactgaccaggcactaccgtaaacacacggggcaccgcccgttccagtgccaaaaatgcgaccgagcattttccaggtcggaccacctcgccttacacatgaagaggcatttttaaatcccagacagtggatatgacccacactgccagaagagaattcagtattttttacttttcacactgtcttcccgatgagggaaggagcccagccagaaagcactacaatcatggtcaagttcccaactgagtcatcttgtgagtggataatcaggaaaaatgaggaatccaaaagacaaaaatcaaagaacagatggggtctgtgactggatcttctatcattccaattctaaatccgacttgaatattcctggacttacaaaatgccaagggggtgactggaagttgtggatatcagggtataaattatatccgtgagttgggggagggaagaccagaattcccttgaattgtgtattgatgcaatataagcataaaagatcaccttgtattctctttaccttctaaaagccattattatgatgttagaagaagaggaagaaattcaggtacagaaaacatgtttaaatagcctaaatgatggtgcttggtgagtcttggttctaaaggtaccaaacaaggaagccaaagttttcaaactgctgcatactttgacaaggaaaatctatatttgtcttccgatcaacatttatgacctaagtcaggtaatatacctggtttacttctttagcatttttatgcagacagtctgttatgcactgtggtttcagatgtgcaataatttgtacaatggtttattcccaagtatgccttaagcagaacaaatgtgtttttctatatagttccttgccttaataaatatgtaatataaatttaagcaaacgtctattttgtatatttgtaaactacaaagtaaaatgaacattttgtggagtttgtattttgcatactcaaggtgagaattaagttttaaataaacctataatattttatctgaa

SEQ ID NO: 182 - DNA, 3562 bp, Homo sapiens
gcggccgccctgcgcgcgaagctcgtggcccgagaggggtgcggtcgggccgacggaggcggggccctggctgcctctctccctgctcataggctggccgctcaggcctggccggcctcggggcctcgggattcgcggcggcgctgccaatcaggcgatcgggccccgcccccccggagttgggtgaaatagaggcgggcgtcaagtgtcagtagtcgcggggcaggtacgtgcgctcgcggttctctcgcggaggtcggcggtggcgggagcgggctccggagagcctgagagcacggtggggcggggcgggagaaagtggccgcccggaggacgttggcgtttacgtgtggaagagcggaagagttttgcttttcgtgcgcgccttcgaaaactgcctgccgctgtctgaggagtccacccgaaacctcccctcctccgccggcagccccgcgctgagctcgccgacccaagccagcgtgggcgaggtgggaagtgcgcccgacccgcgcctggagctgcgcccccgagtgcccatggctacaagggtgctgagcatgagcgcccgcctgggacccgtgccccagccgccggcgccgcaggacgagccggtgttcgcgcagctcaagccggtgctgggcgccgcgaatccggcccgcgacgcggcgctcttccccggcgaggagctgaagcacgcgcaccaccgcccgcaggcgcagcccgcgcccgcgcaggccccgcagccggcccagccgcccgccaccggcccgcggctgcctccagaggacctggtccagacaagatgtgaaatggagaagtatctgacacctcagcttcctccagttcctataattccagagcataaaaagtatagacgagacagtgcctcagtcgtagaccagttcttcactgacactgaagggttaccttacagtatcaacatgaacgtcttcctccctgacatcactcacctgagaactggcctctacaaatcccagagaccgtgcgtaacacacatcaagacagaacctgttgccattttcagccaccagagtgaaacgactgcccctcctccggccccgacccaggccctccctgagttcaccagtatattcagctcacaccagaccgcagctccagaggtgaacaatattttcatcaaacaagaacttcctacaccagatcttcatctttctgtccctacccagcagggccacctgtaccagctactgaatacaccggatctagatatgcccagttctacaaatcagacagcagcaatggacactcttaatgtttctatgtcagctgccatggcaggccttaacacacacacctctgctgttccgcagactgcagtgaaacaattccagggcatgcccccttgcacatacacaatgccaagtcagtttcttccacaacaggccacttactttcccccgtcaccaccaagctcagagcctggaagtccagatagacaagcagagatgctccagaatttaaccccacctccatcctatgctgctacaattgcttctaaactggcaattcacaatccaaatttacccaccaccctgccagttaactcacaaaacatccaacctgtcagatacaatagaaggagtaaccccgatttggagaaacgacgcatccactactgcgattaccctggttgcacaaaagtttataccaagtcttctcatttaaaagctcacctgaggactcacactggtgaaaagccatacaagtgtacctgggaaggctgcgactggaggttcgcgcgatcggatgagctgacccgccactaccggaagcacacaggcgccaagcccttccagtgcggggtgtgcaaccgcagcttctcgcgctctgaccacctggccctgcatatgaagaggcaccagaactgagcactgcccgtgtgacccgttccaggtcccctgggctccctcaaatgacagacctaactattcctgtgtaaaaacaacaaaaacaaacaaaagcaagaaaaccacaactaaaactggaaatgtatattttgtatatttgagaaaacagggaatacattgtattaataccaaagtgtttggtcattttaagaatctggaatgcttgctgtaatgtatatggctttactcaagcagatctcatctcatgacaggcagccacgtctcaacatgggtaaggggtgggggtggaggggagtgtgtgcagcgtttttacctaggcaccatcatttaatgtgacagtgttcagtaaacaaatcagttggcaggcaccagaagaagaatggattgtatgtcaagattttacttggcattgagtagtttttttcaatagtaggtaattccttagagatacagtatacctggcaattcacaaatagccattgaacaaatgtgtgggtttttaaaaattatatacatatatgagttgcctatatttgctattcaaaattttgtaaatatgcaaatcagctttataggtttattacaagttttttaggattcttttggggaagagtcataattcttttgaaaataaccatgaatacacttacagttaggatttgtggtaaggtacctctcaacattaccaaaatcatttctttagagggaaggaataatcattcaaatgaactttaaaaaagcaaatttcatgcactgattaaaataggattattttaaatacaaaaggcattttatatgaattataaactgaagagcttaaagatagttacaaaatacaaaagttcaacctcttacaataagctaaacgcaatgtcatttttaaaaagaaggacttagggtgtcgttttcacatatgacaatgttgcatttatgatgcagtttcaagtaccaaaacgttgaattgatgatgcagttttcatatatcgagatgttcgctcgtgcagtactgttggttaaatgacaatttatgtggattttgcatgtaatacacagtgagacacagtaattttatctaaattacagtgcagtttagttaatctattaatactgactcagtgtctgcctttaaatataaatgatatgttgaaaacttaaggaagcaaatgctacatatatgcaatataaaatagtaatgtgatgctgatgctgttaaccaaagggcagaataaataagcaaaatgccaaaaggggtcttaattgaaatgaaaatttaattttgtttttaaaatattgtttatctttatttattttgtggtaatatagtaagtttttttagaagacaattttcataacttgataaattatagttttgtttgttagaaaagttgctcttaaaagatgtaaatagatgacaaacgatgtaaataattttgtaagaggcttcaaaatgtttatacgtggaaacacacctacatgaaaagcagaaatcggttgctgttttgcttctttttccctcttatttttgtattgtggtcatttcctatgcaaataatggagcaaacagctgtatagttgtagaattttttgagagaatgagatgtttatatattaacgacaattttttttttggaaaataaaaagtgcctaaaaga

SEQ ID NO: 183 - DNA, 1401 bp, Homo sapiens
actttagctcagacctttcttttaaccttgcctatcatgtttcgagtcagaatttaaatactgtgcagtttaagctacaatacgcttggcctataacttggttccaggcatttatatttatgtcacttttgtctacttattatactaacaaggtggaaaaagcaatcccagtctctccaaaagacaagatgtgaaatggagaagtatctgacacctcagcttcctccagttcctataattccagagcataaaaagtatagacgagacagtgcctcagtcgtagaccagttcttcactgacactgaagggttaccttacagtatcaacatgaacgtcttcctccctgacatcactcacctgagaactggcctctacaaatcccagagaccgtgcgtaacacacatcaagacagaacctgttgccattttcagccaccagagtgaaacgactgcccctcctccggccccgacccaggccctccctgagttcaccagtatattcagctcacaccagaccgcagctccagaggtgaacaatattttcatcaaacaagaacttcctacaccagatcttcatctttctgtccctacccagcagggccacctgtaccagctactgaatacaccggatctagatatgcccagttctacaaatcagacagcagcaatggacactcttaatgtttctatgtcagctgccatggcaggccttaacacacacacctctgctgttccgcagactgcagtgaaacaattccagggcatgcccccttgcacatacacaatgccaagtcagtttcttccacaacaggccacttactttcccccgtcaccaccaagctcagagcctggaagtccagatagacaagcagagatgctccagaatttaaccccacctccatcctatgctgctacaattgcttctaaactggcaattcacaatccaaatttacccaccaccctgccagttaactcacaaaacatccaacctgtcagatacaatagaaggagtaaccccgatttggagaaacgacgcatccactactgcgattaccctggttgcacaaaagtttataccaagtcttctcatttaaaagctcacctgaggactcacactggtgaaaagccatacaagtgtacctgggaaggctgcgactggaggttcgcgcgatcggatgagctgacccgccactaccggaagcacacaggcgccaagcccttccagtgcggggtgtgcaaccgcagcttctcgcgctctgaccacctggccctgcatatgaagaggcaccagaactgagcactgcccgtgtgacccgttccaggtcccctgggctccctcaaatgacagacctaactattcctgtgtaaaaacaacaaaaacaaacaaaagcaagaaaaccac

SEQ ID NO: 184 - DNA, 2057 bp, Homo sapiens
agtagtcgcggggcaggtacgtgcgctcgcggttctctcgcggaggtcggcggtggcgggagcgggctccggagagcctgagagcacggtggggcggggcgggagaaagtggccgcccggaggacgttggcgtttacgtgtggaagagcggaagagttttgcttttcgtgcgcgccttcgaaaactgcctgccgctgtctgaggagtccacccgaaacctcccctcctccgccggcagccccgcgctgagctcgccgacccaagccagcgtgggcgaggtgggaagtgcgcccgacccgcgcctggagctgcgcccccgagtgcccatggctacaagggtgctgagcatgagcgcccgcctgggacccgtgccccagccgccggcgccgcaggacgagccggtgttcgcgcagctcaagccggtgctgggcgccgcgaatccggcccgcgacgcggcgctcttccccggcgaggagctgaagcacgcgcaccaccgcccgcggctgcctccagaggacctggtccagacaagatgtgaaatggagaagtatctgacacctcagcttcctccagttcctataattccagagcataaaaagtatagacgagacagtgcctcagtcgtagaccagttcttcactgacactgaagggttaccttacagtatcaacatgaacgtcttcctccctgacatcactcacctgagaactggcctctacaaatcccagagaccgtgcgtaacacacatcaagacagaacctgttgccattttcagccaccagagtgaaacgactgcccctcctccggccccgacccaggccctccctgagttcaccagtatattcagctcacaccagaccgcagctccagaggtgaacaatattttcatcaaacaagaacttcctacaccagatcttcatctttctgtccctacccagcagggccacctgtaccagctactgaatacaccggatctagatatgcccagttctacaaatcagacagcagcaatggacactcttaatgtttctatgtcagctgccatggcaggccttaacacacacacctctgctgttccgcagactgcagtgaaacaattccagggcatgcccccttgcacatacacaatgccaagtcagtttcttccacaacaggccacttactttcccccgtcaccaccaagctcagagcctggaagtccagatagacaagcagagatgctccagaatttaaccccacctccatcctatgctgctacaattgcttctaaactggcaattcacaatccaaatttacccaccaccctgccagttaactcacaaaacatccaacctgtcagatacaatagaaggagtaaccccgatttggagaaacgacgcatccactactgcgattaccctggttgcacaaaagtttataccaagtcttctcatttaaaagctcacctgaggactcacactggtgaaaagccatacaagtgtacctgggaaggctgcgactggaggttcgcgcgatcggatgagctgacccgccactaccggaagcacacaggcgccaagcccttccagtgcggggtgtgcaaccgcagcttctcgcgctctgaccacctggccctgcatatgaagaggcaccagaactgagcactgcccgtgtgacccgttccaggtcccctgggctccctcaaatgacagacctaactattcctgtgtaaaaacaacaaaaacaaacaaaagcaagaaaaccacaactaaaactggaaatgtatattttgtatatttgagaaaacagggaatacattgtattaataccaaagtgtttggtcattttaagaatctggaatgcttgctgtaatgtatatggctttactcaagcagatctcatctcatgacaggcagccacgtctcaacatgggtaaggggtgggggtggaggggagtgtgtgcagcgtttttacctaggcaccatcatttaatgtgacagtgttcagtaaacaaatcagttggcaggcaccagaagaagaatggattgtatgtcaagattttacttggcattgagtag

SEQ ID NO: 185 - DNA, 574 bp, Homo sapiens
actaatgttggaaaaagtacagagtccagggaaagacttgcttgtaactttatgaattctggatttttttttttcctttgctttttcttaactttcactaagggttactgtagtctgatgtgtccttcccaaggccacgaaatttgacaagctgcacttttcttttgctcaatgatttctgctttaagccaaagaactgcctataatttcactaagaatgtcttctaattcagatactggggatttacaagagtctttaaagcacggacttacacctattgataacacagaaaatacaggcacaagaaagatgagagagcagcacacaaccatttcgcatctttttcgtcgggcagaaccgccgcggtgcgcaggcaaggagtccttcccggcagctccgcgcagctccggttccgcgtccggggccgcagctagagcgcgctcgggccggagacgcggactgcgcgcgcacgggggacgcgcgctcgggggctcgcgcccgcgcgggcggtcttgggctcctgctgcgcgcagccccagctggccgctgccaaaatagagttgagctgggtcg

SEQ ID NO: 186 - DNA, 1793 bp, Homo sapiens
aagatctggaagagctttgtcccgtgtgtggagataaagtgtctgggtaccattatgggctcctcacctgtgaaagctgcaagggattttttaagcgaacagtccaaaataataaaaggtacacatgtatagaaaaccagaactgccaaattgacaaaacacagagaaagcgttgtccttactgtcgttttcaaaaatgtctaagtgttggaatgaagctagaagctgtaagggccgaccgaatgcgtggaggaaggaataagtttgggccaatgtacaagagagacagggccctgaagcaacagaaaaaagccctcatccgagccaatggacttaagctagaagccatgtctcaggtgatccaagctatgccctctgacctgaccatttcctctgcaattcaaaacatccactctgcctccaaaggcctacctctgaaccatgctgccttgcctcctacagactatgacagaagtccctttgtaacatcccccattagcatgacaatgccccctcacggcagcctgcaaggttaccaaacatatggccactttcctagccgggccatcaagtctgagtacccagacccctataccagctcacccgagtccataatgggctattcatatatggatagttaccagacgagctctccagcaagcatcccacatctgatactggaacttttgaagtgtgagccagatgagcctcaagtccaggctaaaatcatggcctatttgcagcaagagcaggctaaccgaagcaagcacgaaaagctgagcacctttgggcttatgtgcaaaatggcagatcaaactctcttctccattgtcgagtgggccaggagtagtatcttcttcagagaacttaagggtctcactctgtcgcccagtctggagtgcagtggcacgatcttggctcatggcaacctccacctcctgcattcaagtgattcgcctgcctcagcctcccgagtagctgggattacaggcgtgcaccacaacacccatctaatttttgtatttttagtagagatgggattttgccatgttggccaggctggtctcaaaactcctgacctcagggtgatctgcctgcctcggcctcccaaagtgctgggattatgggcatgagccactgcgcctggccgtaattgtgcttttttttccttttttctttttttgagatggagttacactcttgttgcctgggctggggtgcaatggcacagtctcggctcactgcaacctccacctcctgggttccagcaattctcctgcctcagcctcccgagtagctgggattacaggcatgcgccaccatgcctagctaattttcgtattattagtagaaacaaggtttcaccatgtcagccaggctggtctcaaactcctgacctcagatgatccacccgccttggcctcccaaagtgctgggattacagatgtgagccaccacgctcagccaaattgtactttcagtaaagtactttactgtttacaaagaacttccatatacatttttttggtcctggtctctgtctttcattttgggagcatggatgtaactggcctttcatcaatggttcagtagtgttgttttttaaagcctacaacagaaccatctcctatgaattgactatcacctgtctaaatgccctgtttacagcatgttgtacctgcaagagcaggatatttaaagtactttataattgataattgccattatcaatatgctcacctctttaccatattccaacaggtcttaaaggacttgtattattttttaccgaa

SEQ ID NO: 187 - DNA, 5086 bp, Homo sapiens
gaaactggatacatggtttacagcaggtcactaatgttggaaaaagtacagagtccagggaaagacttgcttgtaactttatgaattctggatttttttttttcctttgctttttcttaactttcactaagggttactgtagtctgatgtgtccttcccaaggccacgaaatttgacaagctgcacttttcttttgctcaatgatttctgctttaagccaaagaactgcctataatttcactaagaatgtcttctaattcagatactggggatttacaagagtctttaaagcacggacttacacctattggtgctgggcttccggaccgacacggatcccccatccccgcccgcggtcgccttgtcatgctgcccaaagtggagacggaagccctgggactggctcgatcgcatggggaacagggccagatgccggaaaacatgcaagtgtctcaatttaaaatggtgaattactcctatgatgaagatctggaagagctttgtcccgtgtgtggagataaagtgtctgggtaccattatgggctcctcacctgtgaaagctgcaagggattttttaagcgaacagtccaaaataataaaaggtacacatgtatagaaaaccagaactgccaaattgacaaaacacagagaaagcgttgtccttactgtcgttttcaaaaatgtctaagtgttggaatgaagctagaagctgtaagggccgaccgaatgcgtggaggaaggaataagtttgggccaatgtacaagagagacagggccctgaagcaacagaaaaaagccctcatccgagccaatggacttaagctagaagccatgtctcaggtgatccaagctatgccctctgacctgaccatttcctctgcaattcaaaacatccactctgcctccaaaggcctacctctgaaccatgctgccttgcctcctacagactatgacagaagtccctttgtaacatcccccattagcatgacaatgccccctcacggcagcctgcaaggttaccaaacatatggccactttcctagccgggccatcaagtctgagtacccagacccctataccagctcacccgagtccataatgggctattcatatatggatagttaccagacgagctctccagcaagcatcccacatctgatactggaacttttgaagtgtgagccagatgagcctcaagtccaggctaaaatcatggcctatttgcagcaagagcaggctaaccgaagcaagcacgaaaagctgagcacctttgggcttatgtgcaaaatggcagatcaaactctcttctccattgtcgagtgggccaggagtagtatcttcttcagagaacttaaggttgatgaccaaatgaagctgcttcagaactgctggagtgagctcttaatcctcgaccacatttaccgacaagtggtacatggaaaggaaggatccatcttcctggttactgggcaacaagtggactattccataatagcatcacaagccggagccaccctcaacaacctcatgagtcatgcacaggagttagtggcaaaacttcgttctctccagtttgatcaacgagagttcgtatgtctgaaattcttggtgctctttagtttagatgtcaaaaaccttgaaaacttccagctggtagaaggtgtccaggaacaagtcaatgccgccctgctggactacacaatgtgtaactacccgcagcagacagagaaatttggacagctacttcttcgactacccgaaatccgggccatcagtatgcaggctgaagaatacctctactacaagcacctgaacggggatgtgccctataataaccttctcattgaaatgttgcatgccaaaagagcataagttacaacccctaggagctctgctttcaaaacaaaaagagattgggggagtggggagggggaagaagaacaggaagaaaaaaagtactctgaactgctccaagtaacgctaattaaaaacttgctttaaagatattgaatttaaaaaggcataataatcaaatacttaatagcaaataaatgatgtatcagggtatttgtattgcaaactgtgaatcaaaggcttcacagccccagaggattccatataaaagacattgtaatggagtggattgaactcacagatggataccaacacggtcagaagaaaaacggacagaacggttcttgtatatttaaactgatctccactatgaagaaatttaggaactaatcttattaattaggcttatacagcgggggatttgagcttacaggattcctccatggtaaagctgaactgaaacaattctcaagaatgcatcagctgtacctacaatagcccctccctcttcctttgaaggccccagcacctctgccctgtggtcaccgaatctgtactaaggacctgtgttcagccacacccagtggtagctccaccaaatcatgaacagcctaattttgagtgtctgtgtcttagacctgcaaacagctaataggaaattctattaatatgttagcttgccattttaaatatgttctgagggttgttttgtctcgtgttcatgatgttaagaaaatgcaggcagtatccctcatcttatgtaagtgttaattaatattaagggaaatgactacaaactttcaaagcaaatgctccatagctaaagcaacttagaccttatttctgctactgttgctgaaatgtggctttggcattgttggatttcataaaaaatttctggcaggaagtcttgttagtatacatcagtctttttcatcatccaagtttgtagttcatttaaaaatacaacattaaacacattttgctaggatgtcaaatagtcacagttctaagtagttggaaacaaaattgacgcatgttaatctatgcaaagagaaaggaaaggatgaggtgatgtattgactcaaggttcattcttgctgcaattgaacatcctcaagagttgggatggaaatggtgatttttacatgtgtcctggaaagatattaaagtaattcaaatcttccccaaaggggaaaggaagagagtgatactgacctttttaagtcatagaccaaagtctgctgtagaacaaatatgggaggacaaagaatcgcaaattcttcaaatgactattatcagtattattaacatgcgatgccacaggtatgaaagtcttgccttatttcacaattttaaaaggtagctgtgcagatgtggatcaacatttgtttaaaataaagtattaatactttaaagtcaaataagatatagtgtttacattctttaggtcctgaggggcagggggatctgtgatataacaaaatagcaaaagcggtaatttccttaatgttatttttctgattggtaattatttttaacagtacttaattattctatgtcgtgagacactaaaatcaaaaacgggaatctcatttagactttaatttttttgagattatcggcggcacaatcactttgtagaaactgtaaaaaataaaagtatctcctagtcccttaattttttcataaatatttctggcttttgagtagtgtatttatattgtatatcatactttcaactgtagacaattatgatgctaatttattgtttcttggtttcacctttgtataagatatagccaagactgaagaaaccaaatatatgtgtttactgtagcatgtcttcaaattagtggaacttagttcagggacatagaagagtcttaatgaattaaaatcattcacttgattaaatgtctgtaaatcttcatcattcctactgtagtttatttaatatctattgtaaattatgtgacttgtagcttcctctggttttcaagtaaactcaacaaggtggagtcttacctggttttcctttccaagcattgtaaattgtataccaaagatattagttattacttctgtgtgtacaaagaggattattttattatgtttattaatcacctctaatactcatccacatgaagggtacacattaggtaagctgggcgttgactcatgcgcagtctcagtcacccgtgttatcttcgtggctcaaaggacaatgcaaaatcgccgatcagagctcatacccaaagcattacagagaacagcagcatcattgccctccccagctgaaaaacaagttggctagaagatacatggagaggaatggtgtggtcaacagttaatgaaacggttctatcatgcatgtgtaatgtggatggagacaattataagatttgactataactatttggagggtctttaacattgccaaaaaaacaaatatgttgatttttattttattttattttttattttaagaggcgggatcttgatctcacatgttgcccaggctggccttgaactcctgggctcaagcattcctcctgcctcagcctcccccatagctgggactaggggtgcatgccagcatacctggctacgttgactcttaaaatctatgttctcttattttaaagatacagtgctccccactgaaaattaaacctaaaaaatgtcacatattggtatgttgttaacctggtagattaaatcatgagaatgattagaaagacgggcaacacagcgggttacatccacactgctgatcacaccaacgacaggagctgataagcaagaaagcgtcacagccagcgtctgttcacccaaggttgacaagtgaagtttctctaatgttgattgttagccgatttgtaacctggcatttacttagcaactgccttatcaattacaggatttgccggtaaaagcagactcaaatataaaggtttttggcttaacttggtttattatagttgctctatgtttgtaaacagacaatctctaatgtctgattatttgtatcacagatctgcagctgccttggacttgaatccatgcaatgtttagagtgtgaagtcagttacttgttgatgttttcttactgtatcaatgaaatacatattgtcatgtcagttcttgccaggaacttctcaacaaaatggaattttttttttcagtatttcaataaatattgatatgcccagcctgataatttttaaaa

SEQ ID NO: 188 - DNA, 213 bp, Homo sapiens
gtctttaaagcacggacttacacctattgatcgaggaaattgccgctctggctgcttctccttcgccgccacgctcagacagaggtcgcttctgactagctgtgctgggcttccggaccgacacggatcccccatccccgcccgcggtcgccttgtcatgctgcccaaagtggagacggaagccctgggactggctcgatcgcatggggaaca

SEQ ID NO: 189 - DNA, 1852 bp, Homo sapiens
gtgtttgtgcgccgttgggtagcaggaggtagagcctaggcgagagcctggtgcgcccacgggtttcgccgaagagtgcccgggggagtgcgggcagggtcccggctgcgcagacctgcgggtgcccgcccacccgcgccccgcgctcccatacttgacctgtgtggatgtggagtctccgggaaataccggatcaggcacttcctggggtctcctggtcactgcccttcctgtgcatagtttgtcatctttttagctgcgaagacgccttcgtgggtctgcgtccggagcaaggcggttacccgatcccggcagtgagccgcgccgcgcgtcgtggcggcctgatttctgtttaactttaatagggcgatctcgagtgtctcaatttaaaatggtgaattactcctatgatgaagatctggaagagctttgtcccgtgtgtggagataaagtgtctgggtaccattatgggctcctcacctgtgaaagctgcaagggattttttaagcgaacagtccaaaataataaaaggtacacatgtatagaaaaccagaactgccaaattgacaaaacacagagaaagcgttgtccttactgtcgttttcaaaaatgtctaagtgttggaatgaagctagaagctgtaagggccgaccgaatgcgtggaggaaggaataagtttgggccaatgtacaagagagacagggccctgaagcaacagaaaaaagccctcatccgagccaatggacttaagctagaagccatgtctcaggtgatccaagctatgccctctgacctgaccatttcctctgcaattcaaaacatccactctgcctccaaaggcctacctctgaaccatgctgccttgcctcctacagactatgacagaagtccctttgtaacatcccccattagcatgacaatgccccctcacggcagcctgcaaggttaccaaacatatggccactttcctagccgggccatcaagtctgagtacccagacccctataccagctcacccgagtccataatgggctattcatatatggatagttaccagacgagctctccagcaagcatcccacatctgatactggaacttttgaagtgtgagccagatgagcctcaagtccaggctaaaatcatggcctatttgcagcaagagcaggctaaccgaagcaagcacgaaaagctgagcacctttgggcttatgtgcaaaatggcagatcaaactctcttctccattgtcgagtgggccaggagtagtatcttcttcagagaacttaaggttgatgaccaaatgaagctgcttcagaactgctggagtgagctcttaatcctcgaccacatttaccgacaagtggtacatggaaaggaaggatccatcttcctggttactgggcaacaagtggactattccataatagcatcacaagccggagccaccctcaacaacctcatgagtcatgcacaggagttagtggcaaaacttcgttctctccagtttgatcaacgagagttcgtatgtctgaaattcttggtgctctttagtttagatgtcaaaaaccttgaaaacttccagctggtagaaggtgtccaggaacaagtcaatgccgccctgctggactacacaatgtgtaactacccgcagcagacagagaaatttggacagctacttcttcgactacccgaaatccgggccatcagtatgcaggctgaagaatacctctactacaagcacctgaacggggatgtgccctataataaccttctcattgaaatgttgcatgccaaaagagcataagttacaacccctaggagctctgctttcaaaacaaaaagagattgggggagt

SEQ ID NO: 190 - DNA, 972 bp, Homo sapiens
gatctggaagagctttgtcccgtgtgtggagataaagtgtctgggtaccattatgggctcctcacctgtgaaagctgcaagggattttttaagcgaacagtccaaaataataaaaggtacacatgtatagaaaaccagaactgccaaattgacaaaacacagagaaagcgttgtccttactgtcgttttcaaaaatgtctaagtgttggaatgaagctagaagctgtaagggccgaccgaatgcgtggaggaaggaataagtttgggccaatgtacaagagagacagggccctgaagcaacagaaaaaagccctcatccgagccaatggacttaagctagaagccatgtctcaggtgatccaagctatgccctctgacctgaccatttcctctgcaattcaaaacatccactctgcctccaaaggcctacctctgaaccatgctgccttgcctcctacagactatgacagaagtccctttgtaacatcccccattagcatgacaatgccccctcacggcagcctgcaaggttaccaaacatatggccactttcctagccgggccatcaagtctgagtacccagacccctataccagctcacccgagtccataatgggctattcatatatggatagttaccagacgagctctccagcaagcatcccacatctgatactggaacttttgaagtgtgagccagatgagcctcaagtccaggctaaaatcatggcctatttgcagcaagagcaggctaaccgaagcaagcacgaaaagctgagcacctttgggcttatgtgcaaaatggcagatcaaactctcttctccattgtcgagtgggccaggagtagtatcttcttcagagaacttaagggtctcactctgtcgcccagtctggagtgcagtggctcttggctcatggcaacctccacctcctgcattcaagtgattcgcctgcctcagcctcccgagtag

SEQ ID NO: 191 - DNA, 3115 bp, Homo sapiens
atggtttacagcaggtcactaatgttggaaaaagtacagagtccagggaaagacttgcttgtaactttatgaattctggatttttttttttcctttgctttttcttaactttcactaagggttactgtagtctgatgtgtccttcccaaggccacgaaatttgacaagctgcacttttcttttgctcaatgatttctgctttaagccaaagaactgcctataatttcactaagaatgtcttctaattcagatactggggatttacaagagtctttaaagcacggacttacacctattgtgtctcaatttaaaatggtgaattactcctatgatgaagatctggaagagctttgtcccgtgtgtggagataaagtgtctgggtaccattatgggctcctcacctgtgaaagctgcaagggattttttaagcgaacagtccaaaataataaaaggtacacatgtatagaaaaccagaactgccaaattgacaaaacacagagaaagcgttgtccttactgtcgttttcaaaaatgtctaagtgttggaatgaagctagaagctgtaagggccgaccgaatgcgtggaggaaggaataagtttgggccaatgtacaagagagacagggccctgaagcaacagaaaaaagccctcatccgagccaatggacttaagctagaagccatgtctcaggtgatccaagctatgccctctgacctgaccatttcctctgcaattcaaaacatccactctgcctccaaaggcctacctctgaaccatgctgccttgcctcctacagactatgacagaagtccctttgtaacatcccccattagcatgacaatgccccctcacggcagcctgcaaggttaccaaacatatggccactttcctagccgggccatcaagtctgagtacccagacccctataccagctcacccgagtccataatgggctattcatatatggatagttaccagacgagctctccagcaagcatcccacatctgatactggaacttttgaagtgtgagccagatgagcctcaagtccaggctaaaatcatggcctatttgcagcaagagcaggctaaccgaagcaagcacgaaaagctgagcacctttgggcttatgtgcaaaatggcagatcaaactctcttctccattgtcgagtgggccaggagtagtatcttcttcagagaacttaaggttgatgaccaaatgaagctgcttcagaactgctggagtgagctcttaatcctcgaccacatttaccgacaagtggtacatggaaaggaaggatccatcttcctggttactgggcaacaagtggactattccataatagcatcacaagccggagccaccctcaacaacctcatgagtcatgcacaggagttagtggcaaaacttcgttctctccagtttgatcaacgagagttcgtatgtctgaaattcttggtgctctttagtttagatgtcaaaaaccttgaaaacttccagctggtagaaggtgtccaggaacaagtcaatgccgccctgctggactacacaatgtgtaactacccgcagcagacagagaaatttggacagctacttcttcgactacccgaaatccgggccatcagtatgcaggctgaagaatacctctactacaagcacctgaacggggatgtgccctataataaccttctcattgaaatgttgcatgccaaaagagcataagttacaacccctaggagctctgctttcaaaacaaaaagagattgggggagtggggagggggaagaagaacaggaagaaaaaaagtactctgaactgctccaagtaacgctaattaaaaacttgctttaaagatattgaatttaaaaaggcataataatcaaatacttaatagcaaataaatgatgtatcagggtatttgtattgcaaactgtgaatcaaaggcttcacagccccagaggattccatataaaagacattgtaatggagtggattgaactcacagatggataccaacacggtcagaagaaaaacggacagaacggttcttgtatatttaaactgatctccactatgaagaaatttaggaactaatcttattaattaggcttatacagcgggggatttgagcttacaggattcctccatggtaaagctgaactgaaacaattctcaagaatgcatcagctgtacctacaatagcccctccctcttcctttgaaggccccagcacctctgccctgtggtcaccgaatctgtactaaggacctgtgttcagccacacccagtggtagctccaccaaatcatgaacagcctaattttgagtgtctgtgtcttagacctgcaaacagctaataggaaattctattaatatgttagcttgccattttaaatatgttctgagggttgttttgtctcgtgttcatgatgttaagaaaatgcaggcagtatccctcatcttatgtaagtgttaattaatattaagggaaatgactacaaactttcaaagcaaatgctccatagctaaagcaacttagaccttatttctgctactgttgctgaaatgtggctttggcattgttggatttcataaaaaatttctggcaggaagtcttgttagtatacatcagtctttttcatcatccaagtttgtagttcatttaaaaatacaacattaaacacattttgctaggatgtcaaatagtcacagttctaagtagttggaaacaaaattgacgcatgttaatctatgcaaagagaaaggaaaggatgaggtgatgtattgactcaaggttcattcttgctgcaattgaacatcctcaagagttgggatggaaatggtgatttttacatgtgtcctggaaagatattaaagtaattcaaatcttccccaaaggggaaaggaagagagtgatactgacctttttaagtcatagaccaaagtctgctgtagaacaaatatgggaggacaaagaatcgcaaattcttcaaatgactattatcagtattattaacatgcgatgccacaggtatgaaagtcttgccttatttcacaattttaaaaggtagctgtgcagatgtggatcaacatttgtttaaaataaagtattaata

SEQ ID NO: 192 - DNA, 1698 bp, Homo sapiens
atgtcttctaattcagatactggggatttacaagagtctttaaagcacggacttacacctattgatcgaggaaattgccgctctggctgcttctccttcgccgccacgctcagacagaggtcgcttctgactagctgtgctgggcttccggaccgacacggatcccccatccccgcccgcggtcgccttgtcatgctgcccaaagtggagacggaagccctgggactggctcgatcgcatggggaacagggccagatgccggaaaacatgcaagtgtctcaatttaaaatggtgaattactcctatgatgaagatctggaagagctttgtcccgtgtgtggagataaagtgtctgggtaccattatgggctcctcacctgtgaaagctgcaagggattttttaagcgaacagtccaaaataataaaaggtacacatgtatagaaaaccagaactgccaaattgacaaaacacagagaaagcgttgtccttactgtcgttttcaaaaatgtctaagtgttggaatgaagctagaagctgtaagggccgaccgaatgcgtggaggaaggaataagtttgggccaatgtacaagagagacagggccctgaagcaacagaaaaaagccctcatccgagccaatggacttaagctagaagccatgtctcaggtgatccaagctatgccctctgacctgaccatttcctctgcaattcaaaacatccactctgcctccaaaggcctacctctgaaccatgctgccttgcctcctacagactatgacagaagtccctttgtaacatcccccattagcatgacaatgccccctcacggcagcctgcaaggttaccaaacatatggccactttcctagccgggccatcaagtctgagtacccagacccctataccagctcacccgagtccataatgggctattcatatatggatagttaccagacgagctctccagcaagcatcccacatctgatactggaacttttgaagtgtgagccagatgagcctcaagtccaggctaaaatcatggcctatttgcagcaagagcaggctaaccgaagcaagcacgaaaagctgagcacctttgggcttatgtgcaaaatggcagatcaaactctcttctccattgtcgagtgggccaggagtagtatcttcttcagagaacttaaggttgatgaccaaatgaagctgcttcagaactgctggagtgagctcttaatcctcgaccacatttaccgacaagtggtacatggaaaggaaggatccatcttcctggttactgggcaacaagtggactattccataatagcatcacaagccggagccaccctcaacaacctcatgagtcatgcacaggagttagtggcaaaacttcgttctctccagtttgatcaacgagagttcgtatgtctgaaattcttggtgctctttagtttagatgtcaaaaaccttgaaaacttccagctggtagaaggtgtccaggaacaagtcaatgccgccctgctggactacacaatgtgtaactacccgcagcagacagagaaatttggacagctacttcttcgactacccgaaatccgggccatcagtatgcaggctgaagaatacctctactacaagcacctgaacggggatgtgccctataataaccttctcattgaaatgttgcatgccaaaagagcataa

SEQ ID NO: 193 - DNA, 2150 bp, Homo sapiens
gggctttatctaactcgctgtagtaattccagcgagaggcagagggagcgagcgggcggccggctagggtggaagagccgggcgagcagagctgcgctgcgggcgtcctgggaagggagatccggagcgaatagggggcttcgcctctggcccagccctcccgctgatcccccagccagcggtccgcaacccttgccgcatccacgaaactttgcccatagcagcgggcgggcactttgcactggaacttacaacacccgagcaaggacgcgactctcccgacgcggggaggctattctgcccatttggggacacttccccgccgctgccaggacccgcttctctgaaaggctctccttgcagctgcttagacgctggatttttttcgggtagtggaaaaccagcctcccgcgacgatgcccctcaacgttagcttcaccaacaggaactatgacctcgactacgactcggtgcagccgtatttctactgcgacgaggaggagaacttctaccagcagcagcagcagagcgagctgcagcccccggcgcccagcgaggatatctggaagaaattcgagctgctgcccaccccgcccctgtcccctagccgccgctccgggctctgctcgccctcctacgttgcggtcacacccttctcccttcggggagacaacgacggcggtggcgggagcttctccacggccgaccagctggagatggtgaccgagctgctgggaggagacatggtgaaccagagtttcatctgcgacccggacgacgagaccttcatcaaaaacatcatcatccaggactgtatgtggagcggcttctcggccgccgccaagctcgtctcagagaagctggcctcctaccaggctgcgcgcaaagacagcggcagcccgaaccccgcccgcggccacagcgtctgctccacctccagcttgtacctgcaggatctgagcgccgccgcctcagagtgcatcgacccctcggtggtcttcccctaccctctcaacgacagcagctcgcccaagtcctgcgcctcgcaagactccagcgccttctctccgtcctcggattctctgctctcctcgacggagtcctccccgcagggcagccccgagcccctggtgctccatgaggagacaccgcccaccaccagcagcgactctgaggaggaacaagaagatgaggaagaaatcgatgttgtttctgtggaaaagaggcaggctcctggcaaaaggtcagagtctggatcaccttctgctggaggccacagcaaacctcctcacagcccactggtcctcaagaggtgccacgtctccacacatcagcacaactacgcagcgcctccctccactcggaaggactatcctgctgccaagagggtcaagttggacagtgtcagagtcctgagacagatcagcaacaaccgaaaatgcaccagccccaggtcctcggacaccgaggagaatgtcaagaggcgaacacacaacgtcttggagcgccagaggaggaacgagctaaaacggagcttttttgccctgcgtgaccagatcccggagttggaaaacaatgaaaaggcccccaaggtagttatccttaaaaaagccacagcatacatcctgtccgtccaagcagaggagcaaaagctcatttctgaagaggacttgttgcggaaacgacgagaacagttgaaacacaaacttgaacagctacggaactcttgtgcgtaaggaaaagtaaggaaaacgattccttctaacagaaatgtcctgagcaatcacctatgaacttgtttcaaatgcatgatcaaatgcaacctcacaaccttggctgagtcttgagactgaaagatttagccataatgtaaactgcctcaaattggactttgggcataaaagaacttttttatgcttaccatcttttttttttctttaacagatttgtatttaagaattgtttttaaaaaattttaagatttacacaatgtttctctgtaaatattgccattaaatgtaaataactttaataaaacgtttatagcagttacacagaatttcaatcctagtatatagtacctagtattataggtactataaaccctaattttttttatttaagtacattttgctttttaaagttgattt

SEQ ID NO: 194 - DNA, 2042 bp, Homo sapiens
ggagtttattcataacgcgctctccaagtatacgtggcaatgcgttgctgggttattttaatcattctaggcatcgttttcctccttatgcctctatcattcctccctatctacactaacatcccacgctctgaacgcgcgcccattaatacccttctttcctccactctccctgggactcttgatcaaagcgcggccctttccccagccttagcgaggcgccctgcagcctggtacgcgcgtggcgtggcggtgggcgcgcagtgcgttctcggtgtggagggcagctgttccgcctgcgatgatttatactcacaggacaaggatgcggtttgtcaaacagtactgctacggaggagcagcagagaaagggagagggtttgagagggagcaaaagaaaatggtaggcgcgcgtagttaattcatgcggctctcttactctgtttacatcctagagctagagtgctcggctgcccggctgagtctcctccccaccttccccaccctccccaccctccccataagcgcccctcccgggttcccaaagcagagggcgtgggggaaaagaaaaaagatcctctctcgctaatctccgcccaccggccctttataatgcgagggtctggacggctgaggacccccgagctgtgctgctcgcggccgccaccgccgggccccggccgtccctggctcccctcctgcctcgagaagggcagggcttctcagaggcttggcgggaaaaagaacggagggagggatcgcgctgagtataaaagccggttttcggggctttatctaactcgctgtagtaattccagcgagaggcagagggagcgagcgggcggccggctagggtggaagagccgggcgagcagagctgcgctgcgggcgtcctgggaagggagatccggagcgaatagggggcttcgcctctggcccagccctcccgctgatcccccagccagcggtccgcaacccttgccgcatccacgaaactttgcccatagcagcgggcgggcactttgcactggaacttacaacacccgagcaaggacgcgactctcccgacgcggggaggctattctgcccatttggggacacttccccgccgctgccaggacccgcttctctgaaaggctctccttgcagctgcttagacgctggatttttttcgggtagtggaaaaccagcagcctcccgcgacgatgcccctcaacgttagcttcaccaacaggaactatgacctcgactacgactcggtgcagccgtatttctactgcgacgaggaggagaacttctaccagcagcagcagcagagcgagctgcagcccccggcgcccagcgaggatatctggaagaaattcgagctgctgcccaccccgcccctgtcccctagccgccgctccgggctctgctcgccctcctacgttgcggtcacacccttctcccttcggggagacaacgacggcggtggcgggagcttctccacggccgaccagctggagatggtgaccgagctgctgggaggagacatggtgaaccagagtttcatctgcgacccggacgacgagaccttcatcaaaaacatcatcatccaggactgtatgtggagcggcttctcggccgccgccaagctcgtctcagagaagctggcctcctaccaggctgcgcgcaaagacagcggcagcccgaaccccgcccgcggccacagcgtctgctccacctccagcttgtacctgcaggatctgagcgccgccgcctcagagtgcatcgacccctcggtggtcttcccctaccctctcaacgacagcagctcgcccaagtcctgcgcctcgcaagactccagcgccttctctccgtcctcggattctctgctctcctcgacggagtcctccccgcagggcagccccgagcccctggtgctccatgaggagacaccgcccaccaccagcagcgactctggaggaacaagaagatgaggaagaaatcgatgttgtttctgtggaaaagaggcaggctcctggcaaaaggtcagagtctgg

SEQ ID NO: 195 - DNA, 2345 bp, Homo sapiens
ctgctcgcggccgccaccgccgggccccggccgtccctggctcccctcctgcctcgagaagggcagggcttctcagaggcttggcgggaaaaagaacggagggagggatcgcgctgagtataaaagccggttttcggggctttatctaactcgctgtagtaattccagcgagaggcagagggagcgagcgggcggccggctagggtggaagagccgggcgagcagagctgcgctgcgggcgtcctgggaagggagatccggagcgaatagggggcttcgcctctggcccagccctcccgctgatcccccagccagcggtccgcaacccttgccgcatccacgaaactttgcccatagcagcgggcgggcactttgcactggaacttacaacacccgagcaaggacgcgactctcccgacgcggggaggctattctgcccatttggggacacttccccgccgctgccaggacccgcttctctgaaaggctctccttgcagctgcttagacgctggatttttttcgggtagtggaaaaccagcagcctcccgcgacgatgcccctcaacgttagcttcaccaacaggaactatgacctcgactacgactcggtgcagccgtatttctactgcgacgaggaggagaacttctaccagcagcagcagcagagcgagctgcagcccccggcgcccagcgaggatatctggaagaaattcgagctgctgcccaccccgcccctgtcccctagccgccgctccgggctctgctcgccctcctacgttgcggtcacacccttctcccttcggggagacaacgacggcggtggcgggagcttctccacggccgaccagctggagatggtgaccgagctgctgggaggagacatggtgaaccagagtttcatctgcgacccggacgacgagaccttcatcaaaaacatcatcatccaggactgtatgtggagcggcttctcggccgccgccaagctcgtctcagagaagctggcctcctaccaggctgcgcgcaaagacagcggcagcccgaaccccgcccgcggccacagcgtctgctccacctccagcttgtacctgcaggatctgagcgccgccgcctcagagtgcatcgacccctcggtggtcttcccctaccctctcaacgacagcagctcgcccaagtcctgcgcctcgcaagactccagcgccttctctccgtcctcggattctctgctctcctcgacggagtcctccccgcagggcagccccgagcccctggtgctccatgaggagacaccgcccaccaccagcagcgactctgaggaggaacaagaagatgaggaagaaatcgatgttgtttctgtggaaaagaggcaggctcctggcaaaaggtcagagtctggatcaccttctgctggaggccacagcaaacctcctcacagcccactggtcctcaagaggtgccacgtctccacacatcagcacaactacgcagcgcctccctccactcggaaggactatcctgctgccaagagggtcaagttggacagtgtcagagtcctgagacagatcagcaacaaccgaaaatgcaccagccccaggtcctcggacaccgaggagaatgtcaagaggcgaacacacaacgtcttggagcgccagaggaggaacgagctaaaacggagcttttttgccctgcgtgaccagatcccggagttggaaaacaatgaaaaggcccccaaggtagttatccttaaaaaagccacagcatacatcctgtccgtccaagcagaggagcaaaagctcatttctgaagaggacttgttgcggaaacgacgagaacagttgaaacacaaacttgaacagctacggaactcttgtgcgtaaggaaaagtaaggaaaacgattccttctaacagaaatgtcctgagcaatcacctatgaacttgtttcaaatgcatgatcaaatgcaacctcacaaccttggctgagtcttgagactgaaagatttagccataatgtaaactgcctcaaattggactttgggcataaaagaacttttttatgcttaccatcttttttttttctttaacagatttgtatttaagaattgtttttaaaaaattttaagatttacacaatgtttctctgtaaatattgccattaaatgtaaataactttaataaaacgtttatagcagttacacagaatttcaatcctagtatatagtacctagtattataggtactataaaccctaattttttttatttaagtacattttgctttttaaagttgatttttttctattgtttttagaaaaaataaaataactggcaaatatatcattgagccaaa

SEQ ID NO: 196 - DNA, 1893 bp, Homo sapiens
aactcgctgtagtaattccagcgagaggcagagggagcgagcgggcggccggctagggtggaagagccgggcgagcagagctgcgctgcgggcgtcctgggaagggagatccggagcgaatagggggcttcgcctctggcccagccctcccgctgatcccccagccagcggtccgcaacccttgccgcatccacgaaactttgcccatagcagcgggcgggcactttgcactggaacttacaacacccgagcaaggacgcgactctcccgacgcggggaggctattctgcccatttggggacacttccccgccgctgccaggacccgcttctctgaaaggctctccttgcagctgcttagacgctggatttttttcgggtagtggaaaaccagcagcctcccgcgacgatgcccctcaacgttagcttcaccaacaggaactatgacctcgactacgactcggtgcagccgtatttctactgcgacgaggaggatatctggaagaaattcgagctgctgcccaccccgcccctgtcccctagccgccgctccgggctctgctcgccctcctacgttgcggtcacacccttctcccttcggggagacaacgacggcggtggcgggagcttctccacggccgaccagctggagatggtgaccgagctgctgggaggagacatggtgaaccagagtttcatctgcgacccggacgacgagaccttcatcaaaaacatcatcatccaggactgtatgtggagcggcttctcggccgccgccaagctcgtctcagagaagctggcctcctaccaggctgcgcgcaaagacagcggcagcccgaaccccgcccgcggccacagcgtctgctccacctccagcttgtacctgcaggatctgagcgccgccgcctcagagtgcatcgacccctcggtggtcttcccctaccctctcaacgacagcagctcgcccaagtcctgcgcctcgcaagactccagcgccttctctccgtcctcggattctctgctctcctcgacggagtcctccccgcagggcagccccgagcccctggtgctccatgaggagacaccgcccaccaccagcagcgactctgaggaggaacaagaagatgaggaagaaatcgatgttgtttctgtggaaaagaggcaggctcctggcaaaaggtcagagtctggatcaccttctgctggaggccacagcaaacctcctcacagcccactggtcctcaagaggtgccacgtctccacacatcagcacaactacgcagcgcctccctccactcggaaggactatcctgctgccaagagggtcaagttggacagtgtcagagtcctgagacagatcagcaacaaccgaaaatgcaccagccccaggtcctcggacaccgaggagaatgtcaagaggcgaacacacaacgtcttggagcgccagaggaggaacgagctaaaacggagcttttttgccctgcgtgaccagatcccggagttggaaaacaatgaaaaggcccccaaggtagttatccttaaaaaagccacagcatacatcctgtccgtccaagcagaggagcaaaagctcatttctgaagaggacttgttgcggaaacgacgagaacagttgaaacacaaacttgaacagctacggaactcttgtgcgtaaggaaaagtaaggaaaacgattccttctaacagaaatgtcctgagcaatcacctatgaacttgtttcaaatgcatgatcaaatgcaacctcacaaccttggctgagtcttgagactgaaagatttagccataatgtaaactgcctcaaattggactttgggcataaaagaacttttttatgcttaccatcttttttttttctttaacagatttgtatttaaga

SEQ ID NO: 197 - DNA, 1834 bp, Homo sapiens
atctgtctggacgcgctgggtggatgcggggggctcctgggaactgtgttggagccgagcaagcgctagccaggcgcaagcgcgcacagactgtagccatccgaggacacccccgcccccccggcccacccggagacacccgcgcagaatcgcctccggatcccctgcagtcggcgggagtgttggaggtcggcgccggcccccgccttccgcgccccccacgggaaggaagcacccccggtattaaaacgaacggggcggaaagaagccctcagtcgccggccgggaggcgagccgatgccgagctgctccacgtccaccatgccgggcatgatctgcaagaacccagacctcgagtttgactcgctacagccctgcttctacccggacgaagatgacttctacttcggcggccccgactcgacccccccgggggaggacatctggaagaagtttgagctgctgcccacgcccccgctgtcgcccagccgtggcttcgcggagcacagctccgagcccccgagctgggtcacggagatgctgcttgagaacgagctgtggggcagcccggccgaggaggacgcgttcggcctggggggactgggtggcctcacccccaacccggtcatcctccaggactgcatgtggagcggcttctccgcccgcgagaagctggagcgcgccgtgagcgagaagctgcagcacggccgcgggccgccaaccgccggttccaccgcccagtccccgggggtcgcccctccgcgcccaggcggccgccagaccagcggcggcgaccacaaggccctcagtacctccggagaggacaccctgagcgattcagatgatgaagatgatgaagaggaagatgaagaggaagaaatcgacgtggtcactgtggagaagcggcgttcctcctccaacaccaaggctgtcaccacattcaccatcactgtgcgtcccaagaacgcagccctgggtcccgggagggctcagtccagcgagctgatcctcaaacgatgccttcccatccaccagcagcacaactatgccgccccctctccctacgtggagagtgaggatgcacccccacagaagaagataaagagcgaggcgtccccacgtccgctcaagagtgtcatccccccaaaggctaagagcttgagcccccgaaactctgactcggaggacagtgagcgtcgcagaaaccacaacatcctggagcgccagcgccgcaacgaccttcggtccagctttctcacgctcagggaccacgtgccggagttggtaaagaatgagaaggccgccaaggtggtcattttgaaaaaggccactgagtatgtccactccctccaggccgaggagcaccagcttttgctggaaaaggaaaaattgcaggcaagacagcagcagttgctaaagaaaattgaacacgctcggacttgctagacgcttctcaaaactggacagtcactgccactttgcacattttgattttttttttaaacaaacattgtgttgacattaagaatgttggtttactttcaaatcggtcccctgtcgagttcggctctgggtgggcagtaggaccaccagtgtggggttctgctgggaccttggagagcctgcatcccaggatgctgggtggccctgcagcctcctccacctcacctccatgacagcgctaaacgttggtgacggttgggagcctctggggctgttgaagtcaccttgtgtgttccaagtttccaaacaacagaaagtcattccttctttttaaaatggtgcttaagttccagcagatgccacataaggggtttgccatttgatacccctg

SEQ ID NO: 198 - DNA, 2602 bp, Homo sapiens
atctgtctggacgcgctgggtggatgcggggggctcctgggaactgtgttggagccgagcaagcgctagccaggcgcaagcgcgcacagactgtagccatccgaggacacccccgcccccccggcccacccggagacacccgcgcagaatcgcctccggatcccctgcagtcggcgggagtgttggaggtcggcgccggcccccgccttccgcgccccccacgggaaggaagcacccccggtattaaaacgaacggggcggaaagaagccctcagtcgccggccgggaggcgagccgatgccgagctgctccacgtccaccatgccgggcatgatctgcaagaacccagacctcgagtttgactcgctacagccctgcttctacccggacgaagatgacttctacttcggcggccccgactcgacccccccgggggaggacatctggaagaagtttgagctgctgcccacgcccccgctgtcgcccagccgtggcttcgcggagcacagctccgagcccccgagctgggtcacggagatgctgcttgagaacgagctgtggggcagcccggccgaggaggacgcgttcggcctggggggactgggtggcctcacccccaacccggtcatcctccaggactgcatgtggagcggcttctccgcccgcgagaagctggagcgcgccgtgagcgagaagctgcagcacggccgcgggccgccaaccgccggttccaccgcccagtccccgggagccggcgccgccagccctgcgggtcgcgggcacggcggggctgcgggagccggccgcgccggggccgccctgcccgccgagctcgcccacccggccgccgagtgcgtggatcccgccgtggtcttcccctttcccgtgaacaagcgcgagccagcgcccgtgcccgcagccccggccagtgccccggcggcgggccctgcggtcgcctcgggggcgggtattgccgccccagccggggccccgggggtcgcccctccgcgcccaggcggccgccagaccagcggcggcgaccacaaggccctcagtacctccggagaggacaccctgagcgattcagatgatgaagatgatgaagaggaagatgaagaggaagaaatcgacgtggtcactgtggagaagcggcgttcctcctccaacaccaaggctgtcaccacattcaccatcactgtgcgtcccaagaacgcagccctgggtcccgggagggctcagtccagcgagctgatcctcaaacgatgccttcccatccaccagcagcacaactatgccgccccctctccctacgtggagagtgaggatgcacccccacagaagaagataaagagcgaggcgtccccacgtccgctcaagagtgtcatccccccaaaggctaagagcttgagcccccgaaactctgactcggaggacagtgagcgtcgcagaaaccacaacatcctggagcgccagcgccgcaacgaccttcggtccagctttctcacgctcagggaccacgtgccggagttggtaaagaatgagaaggccgccaaggtggtcattttgaaaaaggccactgagtatgtccactccctccaggccgaggagcaccagcttttgctggaaaaggaaaaattgcaggcaagacagcagcagttgctaaagaaaattgaacacgctcggacttgctagacgcttctcaaaactggacagtcactgccactttgcacattttgattttttttttaaacaaacattgtgttgacattaagaatgttggtttactttcaaatcggtcccctgtcgagttcggctctgggtgggcagtaggaccaccagtgtggggttctgctgggaccttggagagcctgcatcccaggatgctgggtggccctgcagcctcctccacctcacctccatgacagcgctaaacgttggtgacggttgggagcctctggggctgttgaagtcaccttgtgtgttccaagtttccaaacaacagaaagtcattccttctttttaaaatggtgcttaagttccagcagatgccacataaggggtttgccatttgatacccctggggaacatttctgtaaataccattgacacatccgccttttgtatacatcctgggtaatgagaggtggcttttgcggccagtattagactggaagttcatacctaagtactgtaataatacctcaatgtttgaggagcatgttttgtatacaaatatattgttaatctctgttatgtactgtactaattcttacactgcctgtatactttagtatgacgctgatacataactaaatttgatacttatattttcgtatgaaaatgagttgtgaaagttttgagtagatattactttatcactttttgaactaagaaacttttgtaaagaaatttactatatatatatgcctttttcctagcctgtttcttcctgttaatgtatttgttcatgtttggtgcatagaactgggtaaatgcaaagttctgtgtttaatttcttcaaaatgtatatatttagtgctgcatcttatagcactttgaaatacctcatgtttatgaaaataaatagcttaaaattaaatga

SEQ ID NO: 199 - DNA, 1923 bp, Homo sapiens
atgtgtgtgtgtcgggggggggggtggtatttaaagggaaaagctgacagtgctgctgagtgagggagagggtgctgcgagctgctgggctgcacacgcacacgcacacgcacacgcacactgatgcacacggacctggacacagacatggacatggacacagaaaccacagcactctgcccctctggcagccgccgggcctcccctccagggacgcccacaccagaagcagatgccacgctactaaagaagtcagagaaactgttggcagagttggaccggagcgggttaccctctgcccctggggcccccagacgaagaggcagtatgcctgtcccctacaagcaccagctccggcgggcccaggctgtagatgaacttgactggccacctcaggcctcatcctctggctcgtctgactccttgggctcaggggaggcagcccctgctcaaaaggatggcatcttcaaggtcatgctagtgggggagagcggcgtgggcaagagcaccctagcaggcacttttggtggtctccagggagacagtgctcacgaaccggagaacccagaggatacctatgagagacgcatcatggtggataaggaggaagtgactctagtcgtttatgacatctgggaacagggggatgcaggagggtggctgcgggaccactgccttcagaccggggacgcctttctcatcgtcttctcagtcaccgaccgacggagtttctccaaagttccagagaccctacttcggctccgggctgggaggccgcaccacgacctacccgttatcctcgttggaaacaagagcgacttggcccgctcccgggaggtatcactggaggagggccgccacctggccgggacgctgagctgcaagcacatcgagacgtcggccgcactgcaccacaacacgagggagctcttcgagggcgcggtgcgccagatccggctgcggcggggccgaaaccacgccggaggccagaggcccgatccgggcagccccgagggccctgcgccacctgcacgccgcgagagcctcaccaagaaagccaagaggttcctcgccaacctggtgccgcgcaacgccaagttcttcaagcagcgctccaggtcgtgtcacgacctctcggtgctctgagccgcggtcgccatggccactgcggtcgccatggtcaccgcgccctccgctcgccccccctcgccccgccccgcccccgtccggcttccttggtggaggccgtctaggaaaccaaaaactcccaggatgccccggtgtgaccgccgggggcggcccggggccgctcggcggcacctccacacccgccccaacgcgttctctggagctttgggcctcagggcgcctagaaggcgaggacgcagacctgaaggcggccggtgagcggggcgggttctgctgggtcgggaagaaaaataattctgcaaggtattttgttttttattaattcgcgcttggccacctcatctgtaaagagattctaaaagcaagatctggaaaagtgcttcgtagactccttgacggagtttgcctcctttgtacgctgcgtgaacatgcctcacctttaagagagtcttaaaggtaaagacacgaaaacacttcctccagggaccttcccgaaaacgttctggctctcatctggtgcggcatgtgtccactttgcctttaaggagttcttaaaggcaagggcctggaagtgctgttcctgagatggattctcttgacttaccagtccaccacggcacttcccctttaaggttattaaaggtaaggggtggacagactttctgcattcagataatgagcagtggcaaccccttttggccagggccaggggggcaccagcaaggggccaccctttcccttttcaataaataatttttgtactgcctctgttca

SEQ ID NO: 200 - DNA, 1331 bp, Homo sapiens
gagtgagggagagggtgctgcgagctgctgggctgcacacgcacacgcacacgcacacgcacactgatgcacacggacctggacacagacatggacatggacacagaaaccacagcactctgcccctctggcagccgccgggcctcccctccagggacgcccacaccagaagcagatgccacgctactaaagaagtcagagaaactgttggcagagttggaccggagcgggttaccctctgcccctggggcccccagacgaagaggcagtatgcctgtcccctacaagcaccagctccggcgggcccaggctgtagatgaacttgactggccacctcaggcctcatcctctggctcgtctgactccttgggctcaggggaggcagcccctgctcaaaaggatggcatcttcaaggtcatgctagtgggggagagcggcgtgggcaagagcaccctagcaggcacttttggtggtctccagggagacagtgctcacgaaccggagaacccagggggatgcaggagggtggctgcgggaccactgccttcagaccggggacgcctttctcatcgtcttctcagtcaccgaccgacggagtttctccaaagttccagagaccctacttcggctccgggctgggaggccgcaccacgacctacccgttatcctcgttggaaacaagagcgacttggcccgctcccgggaggtatcactggagggtgtgtatcctgaacagattccatacttgcgatctcaggggaatgctctcccttccaagtcacctcttctccctaaggcctttttaccatcgcggacgcactcacttgcaatcagacccaggctagggggacactcccaatgccccactcgaggatcctgagaatcccttcttgtcacttcccctcacctctctcctaggcctccttctccctctccttcgcacctccacagacccaccatatgagctcagccatgttctctcggttgcaagattcactagtaccaatcccttgccaccgcacgcccaggccctccctagacccaccctcgccccgggtcccgtacagcccagcgggcgcctgagccggtgccttcctgcagagggccgccacctggccgggacgctgagctgcaagcacatcgagacgtcggccgcactgcaccacaacacgagggagctcttcgagggcgcggtgcgccagatccggctgcggcggggccgaaaccacgccggaggccagaggcccgatccgggcagccccgagggccctgcgccacctgcacgccgcgagagcctcaccaagaaagccaagaggttcctcgccaacctg

SEQ ID NO: 201 - DNA, 3829 bp, Homo sapiens
caggcagcgctgcgtcctgctgcgcacgtgggaagccctggccccggccacccccgcgatgccgcgcgctccccgctgccgagccgtgcgctccctgctgcgcagccactaccgcgaggtgctgccgctggccacgttcgtgcggcgcctggggccccagggctggcggctggtgcagcgcggggacccggcggctttccgcgcgctggtggcccagtgcctggtgtgcgtgccctgggacgcacggccgccccccgccgccccctccttccgccaggtgtcctgcctgaaggagctggtggcccgagtgctgcagaggctgtgcgagcgcggcgcgaagaacgtgctggccttcggcttcgcgctgctggacggggcccgcgggggcccccccgaggccttcaccaccagcgtgcgcagctacctgcccaacacggtgaccgacgcactgcgggggagcggggcgtgggggctgctgctgcgccgcgtgggcgacgacgtgctggttcacctgctggcacgctgcgcgctctttgtgctggtggctcccagctgcgcctaccaggtgtgcgggccgccgctgtaccagctcggcgctgccactcaggcccggcccccgccacacgctagtggaccccgaaggcgtctgggatgcgaacgggcctggaaccatagcgtcagggaggccggggtccccctgggcctgccagccccgggtgcgaggaggcgcgggggcagtgccagccgaagtctgccgttgcccaagaggcccaggcgtggcgctgcccctgagccggagcggacgcccgttgggcaggggtcctgggcccacccgggcaggacgcgtggaccgagtgaccgtggtttctgtgtggtgtcacctgccagacccgccgaagaagccacctctttggagggtgcgctctctggcacgcgccactcccacccatccgtgggccgccagcaccacgcgggccccccatccacatcgcggccaccacgtccctgggacacgccttgtcccccggtgtacgccgagaccaagcacttcctctactcctcaggcgacaaggagcagctgcggccctccttcctactcagctctctgaggcccagcctgactggcgctcggaggctcgtggagaccatctttctgggttccaggccctggatgccagggactccccgcaggttgccccgcctgccccagcgctactggcaaatgcggcccctgtttctggagctgcttgggaaccacgcgcagtgcccctacggggtgctcctcaagacgcactgcccgctgcgagctgcggtcaccccagcagccggtgtctgtgcccgggagaagccccagggctctgtggcggcccccgaggaggaggacacagacccccgtcgcctggtgcagctgctccgccagcacagcagcccctggcaggtgtacggcttcgtgcgggcctgcctgcgccggctggtgcccccaggcctctggggctccaggcacaacgaacgccgcttcctcaggaacaccaagaagttcatctccctggggaagcatgccaagctctcgctgcaggagctgacgtggaagatgagcgtgcgggactgcgcttggctgcgcaggagcccaggggttggctgtgttccggccgcagagcaccgtctgcgtgaggagatcctggccaagttcctgcactggctgatgagtgtgtacgtcgtcgagctgctcaggtctttcttttatgtcacggagaccacgtttcaaaagaacaggctctttttctaccggaagagtgtctggagcaagttgcaaagcattggaatcagacagcacttgaagagggtgcagctgcgggagctgtcggaagcagaggtcaggcagcatcgggaagccaggcccgccctgctgacgtccagactccgcttcatccccaagcctgacgggctgcggccgattgtgaacatggactacgtcgtgggagccagaacgttccgcagagaaaagagggccgagcgtctcacctcgagggtgaaggcactgttcagcgtgctcaactacgagcgggcgcggcgccccggcctcctgggcgcctctgtgctgggcctggacgatatccacagggcctggcgcaccttcgtgctgcgtgtgcgggcccaggacccgccgcctgagctgtactttgtcaaggtggatgtgacgggcgcgtacgacaccatcccccaggacaggctcacggaggtcatcgccagcatcatcaaaccccagaacacgtactgcgtgcgtcggtatgccgtggtccagaaggccgcccatgggcacgtccgcaaggccttcaagagccacgtcctacgtccagtgccaggggatcccgcagggctccatcctctccacgctgctctgcagcctgtgctacggcgacatggagaacaagctgtttgcggggattcggcgggacgggctgctcctgcgtttggtggatgatttcttgttggtgacacctcacctcacccacgcgaaaaccttcctcaggaccctggtccgaggtgtccctgagtatggctgcgtggtgaacttgcggaagacagtggtgaacttccctgtagaagacgaggccctgggtggcacggcttttgttcagatgccggcccacggcctattcccctggtgcggcctgctgctggatacccggaccctggaggtgcagagcgactactccagctatgcccggacctccatcagagccagtctcaccttcaaccgcggcttcaaggctgggaggaacatgcgtcgcaaactctttggggtcttgcggctgaagtgtcacagcctgtttctggatttgcaggtgaacagcctccagacggtgtgcaccaacatctacaagatcctcctgctgcaggcgtacaggtttcacgcatgtgtgctgcagctcccatttcatcagcaagtttggaagaaccccacatttttcctgcgcgtcatctctgacacggcctccctctgctactccatcctgaaagccaagaacgcagggatgtcgctgggggccaagggcgccgccggccctctgccctccgaggccgtgcagtggctgtgccaccaagcattcctgctcaagctgactcgacaccgtgtcacctacgtgccactcctggggtcactcaggacagcccagacgcagctgagtcggaagctcccggggacgacgctgactgccctggaggccgcagccaacccggcactgccctcagacttcaagaccatcctggactgatggccacccgcccacagccaggccgagagcagacaccagcagccctgtcacgccgggctctacgtcccagggagggaggggcggcccacacccaggcccgcaccgctgggagtctgaggcctgagtgagtgtttggccgaggcctgcatgtccggctgaaggctgagtgtccggctgaggcctgagcgagtgtccagccaagggctgagtgtccagcacacctgccgtcttcacttccccacaggctggcgctcggctccaccccagggccagcttttcctcaccaggagcccggcttccactccccacataggaatagtccatccccagattcgccattgttcacccctcgccctgccctcctttgccttccacccccaccatccaggtggagaccctgagaaggaccctgggagctctgggaatttggagtgaccaaaggtgtgccctgtacacaggcgaggaccctgcacctggatgggggtccctgtgggtcaaattggggggaggtgctgtgggagtaaaatactgaatatatgagtttttcagttttg

SEQ ID NO: 202 - DNA, 3210 bp, Homo sapiens
atgccgcgcgctccccgctgccgagccgtgcgctccctgctgcgcagccactaccgcgaggtgctgccgctggccacgttcgtgcggcgcctggggccccagggctggcggctggtgcagcgcggggacccggcggctttccgcgcgctggtggcccagtgcctggtgtgcgtgccctgggacgcacggccgccccccgccgccccctccttccgccaggtgtcctgcctgaaggagctggtggcccgagtgctgcagaggctgtgcgagcgcggcgcgaagaacgtgctggccttcggcttcgcgctgctggacggggcccgcgggggcccccccgaggccttcaccaccagcgtgcgcagctacctgcccaacacggtgaccgacgcactgcgggggagcggggcgtgggggctgctgctgcgccgcgtgggcgacgacgtgctggttcacctgctggcacgctgcgcgctctttgtgctggtggctcccagctgcgcctaccaggtgtgcgggccgccgctgtaccagctcggcgctgccactcaggcccggcccccgccacacgctagtggaccccgaaggcgtctgggatgcgaacgggcctggaaccatagcgtcagggaggccggggtccccctgggcctgccagccccgggtgcgaggaggcgcgggggcagtgccagccgaagtctgccgttgcccaagaggcccaggcgtggcgctgcccctgagccggagcggacgcccgttgggcaggggtcctgggcccacccgggcaggacgcgtggaccgagtgaccgtggtttctgtgtggtgtcacctgccagacccgccgaagaagccacctctttggagggtgcgctctctggcacgcgccactcccacccatccgtgggccgccagcaccacgcgggccccccatccacatcgcggccaccacgtccctgggacacgccttgtcccccggtgtacgccgagaccaagcacttcctctactcctcaggcgacaaggagcagctgcggccctccttcctactcagctctctgaggcccagcctgactggcgctcggaggctcgtggagaccatctttctgggttccaggccctggatgccagggactccccgcaggttgccccgcctgccccagcgctactggcaaatgcggcccctgtttctggagctgcttgggaaccacgcgcagtgcccctacggggtgctcctcaagacgcactgcccgctgcgagctgcggtcaccccagcagccggtgtctgtgcccgggagaagccccagggctctgtggcggcccccgaggaggaggacacagacccccgtcgcctggtgcagctgctccgccagcacagcagcccctggcaggtgtacggcttcgtgcgggcctgcctgcgccggctggtgcccccaggcctctggggctccaggcacaacgaacgccgcttcctcaggaacaccaagaagttcatctccctggggaagcatgccaagctctcgctgcaggagctgacgtggaagatgagcgtgcgggactgcgcttggctgcgcaggagcccaggggttggctgtgttccggccgcagagcaccgtctgcgtgaggagatcctggccaagttcctgcactggctgatgagtgtgtacgtcgtcgagctgctcaggtctttcttttatgtcacggagaccacgtttcaaaagaacaggctctttttctaccggaagagtgtctggagcaagttgcaaagcattggaatcagacagcacttgaagagggtgcagctgcgggagctgtcggaagcagaggtcaggcagcatcgggaagccaggcccgccctgctgacgtccagactccgcttcatccccaagcctgacgggctgcggccgattgtgaacatggactacgtcgtgggagccagaacgttccgcagagaaaagagggccgagcgtctcacctcgagggtgaaggcactgttcagcgtgctcaactacgagcgggcgcggcgccccggcctcctgggcgcctctgtgctgggcctggacgatatccacagggcctggcgcaccttcgtgctgcgtgtgcgggcccaggacccgccgcctgagctgtactttgtcaaggtggatgtgacgggcgcgtacgacaccatcccccaggacaggctcacggaggtcatcgccagcatcatcaaaccccagaacacgtactgcgtgcgtcggtatgccgtggtccagaaggccgcccatgggcacgtccgcaaggccttcaagagccacgtctctaccttgacagacctccagccgtacatgcgacagttcgtggctcacctgcaggagaccagcccgctgagggatgccgtcgtcatcgagcagagctcctccctgaatgaggccagcagtggcctcttcgacgtcttcctacgcttcatgtgccaccacgccgtgcgcatcaggggcaagtcctacgtccagtgccaggggatcccgcagggctccatcctctccacgctgctctgcagcctgtgctacggcgacatggagaacaagctgtttgcggggattcggcgggacgggctgctcctgcgtttggtggatgatttcttgttggtgacacctcacctcacccacgcgaaaaccttcctcagctatgcccggacctccatcagagccagtctcaccttcaaccgcggcttcaaggctgggaggaacatgcgtcgcaaactctttggggtcttgcggctgaagtgtcacagcctgtttctggatttgcaggtgaacagcctccagacggtgtgcaccaacatctacaagatcctcctgctgcaggcgtacaggtttcacgcatgtgtgctgcagctcccatttcatcagcaagtttggaagaaccccacatttttcctgcgcgtcatctctgacacggcctccctctgctactccatcctgaaagccaagaacgcagggatgtcgctgggggccaagggcgccgccggccctctgccctccgaggccgtgcagtggctgtgccaccaagcattcctgctcaagctgactcgacaccgtgtcacctacgtgccactcctggggtcactcaggacagcccagacgcagctgagtcggaagctcccggggacgacgctgactgccctggaggccgcagccaacccggcactgccctcagacttcaagaccatcctggactga

SEQ ID NO: 203 - DNA, 4018 bp, Homo sapiens
caggcagcgctgcgtcctgctgcgcacgtgggaagccctggccccggccacccccgcgatgccgcgcgctccccgctgccgagccgtgcgctccctgctgcgcagccactaccgcgaggtgctgccgctggccacgttcgtgcggcgcctggggccccagggctggcggctggtgcagcgcggggacccggcggctttccgcgcgctggtggcccagtgcctggtgtgcgtgccctgggacgcacggccgccccccgccgccccctccttccgccaggtgtcctgcctgaaggagctggtggcccgagtgctgcagaggctgtgcgagcgcggcgcgaagaacgtgctggccttcggcttcgcgctgctggacggggcccgcgggggcccccccgaggccttcaccaccagcgtgcgcagctacctgcccaacacggtgaccgacgcactgcgggggagcggggcgtgggggctgctgctgcgccgcgtgggcgacgacgtgctggttcacctgctggcacgctgcgcgctctttgtgctggtggctcccagctgcgcctaccaggtgtgcgggccgccgctgtaccagctcggcgctgccactcaggcccggcccccgccacacgctagtggaccccgaaggcgtctgggatgcgaacgggcctggaaccatagcgtcagggaggccggggtccccctgggcctgccagccccgggtgcgaggaggcgcgggggcagtgccagccgaagtctgccgttgcccaagaggcccaggcgtggcgctgcccctgagccggagcggacgcccgttgggcaggggtcctgggcccacccgggcaggacgcgtggaccgagtgaccgtggtttctgtgtggtgtcacctgccagacccgccgaagaagccacctctttggagggtgcgctctctggcacgcgccactcccacccatccgtgggccgccagcaccacgcgggccccccatccacatcgcggccaccacgtccctgggacacgccttgtcccccggtgtacgccgagaccaagcacttcctctactcctcaggcgacaaggagcagctgcggccctccttcctactcagctctctgaggcccagcctgactggcgctcggaggctcgtggagaccatctttctgggttccaggccctggatgccagggactccccgcaggttgccccgcctgccccagcgctactggcaaatgcggcccctgtttctggagctgcttgggaaccacgcgcagtgcccctacggggtgctcctcaagacgcactgcccgctgcgagctgcggtcaccccagcagccggtgtctgtgcccgggagaagccccagggctctgtggcggcccccgaggaggaggacacagacccccgtcgcctggtgcagctgctccgccagcacagcagcccctggcaggtgtacggcttcgtgcgggcctgcctgcgccggctggtgcccccaggcctctggggctccaggcacaacgaacgccgcttcctcaggaacaccaagaagttcatctccctggggaagcatgccaagctctcgctgcaggagctgacgtggaagatgagcgtgcgggactgcgcttggctgcgcaggagcccaggggttggctgtgttccggccgcagagcaccgtctgcgtgaggagatcctggccaagttcctgcactggctgatgagtgtgtacgtcgtcgagctgctcaggtctttcttttatgtcacggagaccacgtttcaaaagaacaggctctttttctaccggaagagtgtctggagcaagttgcaaagcattggaatcagacagcacttgaagagggtgcagctgcgggagctgtcggaagcagaggtcaggcagcatcgggaagccaggcccgccctgctgacgtccagactccgcttcatccccaagcctgacgggctgcggccgattgtgaacatggactacgtcgtgggagccagaacgttccgcagagaaaagagggccgagcgtctcacctcgagggtgaaggcactgttcagcgtgctcaactacgagcgggcgcggcgccccggcctcctgggcgcctctgtgctgggcctggacgatatccacagggcctggcgcaccttcgtgctgcgtgtgcgggcccaggacccgccgcctgagctgtactttgtcaaggtggatgtgacgggcgcgtacgacaccatcccccaggacaggctcacggaggtcatcgccagcatcatcaaaccccagaacacgtactgcgtgcgtcggtatgccgtggtccagaaggccgcccatgggcacgtccgcaaggccttcaagagccacgtctctaccttgacagacctccagccgtacatgcgacagttcgtggctcacctgcaggagaccagcccgctgagggatgccgtcgtcatcgagcagagctcctccctgaatgaggccagcagtggcctcttcgacgtcttcctacgcttcatgtgccaccacgccgtgcgcatcaggggcaagtcctacgtccagtgccaggggatcccgcagggctccatcctctccacgctgctctgcagcctgtgctacggcgacatggagaacaagctgtttgcggggattcggcgggacgggctgctcctgcgtttggtggatgatttcttgttggtgacacctcacctcacccacgcgaaaaccttcctcaggaccctggtccgaggtgtccctgagtatggctgcgtggtgaacttgcggaagacagtggtgaacttccctgtagaagacgaggccctgggtggcacggcttttgttcagatgccggcccacggcctattcccctggtgcggcctgctgctggatacccggaccctggaggtgcagagcgactactccagctatgcccggacctccatcagagccagtctcaccttcaaccgcggcttcaaggctgggaggaacatgcgtcgcaaactctttggggtcttgcggctgaagtgtcacagcctgtttctggatttgcaggtgaacagcctccagacggtgtgcaccaacatctacaagatcctcctgctgcaggcgtacaggtttcacgcatgtgtgctgcagctcccatttcatcagcaagtttggaagaaccccacatttttcctgcgcgtcatctctgacacggcctccctctgctactccatcctgaaagccaagaacgcagggatgtcgctgggggccaagggcgccgccggccctctgccctccgaggccgtgcagtggctgtgccaccaagcattcctgctcaagctgactcgacaccgtgtcacctacgtgccactcctggggtcactcaggacagcccagacgcagctgagtcggaagctcccggggacgacgctgactgccctggaggccgcagccaacccggcactgccctcagacttcaagaccatcctggactgatggccacccgcccacagccaggccgagagcagacaccagcagccctgtcacgccgggctctacgtcccagggagggaggggcggcccacacccaggcccgcaccgctgggagtctgaggcctgagtgagtgtttggccgaggcctgcatgtccggctgaaggctgagtgtccggctgaggcctgagcgagtgtccagccaagggctgagtgtccagcacacctgccgtcttcacttccccacaggctggcgctcggctccaccccagggccagcttttcctcaccaggagcccggcttccactccccacataggaatagtccatccccagattcgccattgttcacccctcgccctgccctcctttgccttccacccccaccatccaggtggagaccctgagaaggaccctgggagctctgggaatttggagtgaccaaaggtgtgccctgtacacaggcgaggaccctgcacctggatgggggtccctgtgggtcaaattggggggaggtgctgtgggagtaaaatactgaatatatgagtttttcagttttgaaaaaaa

SEQ ID NO: 204 - DNA, 2486 bp, Homo sapiens
atgccgcgcgctccccgctgccgagccgtgcgctccctgctgcgcagccactaccgcgaggtgctgccgctggccacgttcgtgcggcgcctggggccccagggctggcggctggtgcagcgcggggacccggcggctttccgcgcgctggtggcccagtgcctggtgtgcgtgccctgggacgcacggccgccccccgccgccccctccttccgccaggtgtcctgcctgaaggagctggtggcccgagtgctgcagaggctgtgcgagcgcggcgcgaagaacgtgctggccttcggcttcgcgctgctggacggggcccgcgggggcccccccgaggccttcaccaccagcgtgcgcagctacctgcccaacacggtgaccgacgcactgcgggggagcggggcgtgggggctgctgctgcgccgcgtgggcgacgacgtgctggttcacctgctggcacgctgcgcgctctttgtgctggtggctcccagctgcgcctaccaggtgtgcgggccgccgctgtaccagctcggcgctgccactcaggcccggcccccgccacacgctagtggaccccgaaggcgtctgggatgcgaacgggcctggaaccatagcgtcagggaggccggggtccccctgggcctgccagccccgggtgcgaggaggcgcgggggcagtgccagccgaagtctgccgttgcccaagaggcccaggcgtggcgctgcccctgagccggagcggacgcccgttgggcaggggtcctgggcccacccgggcaggacgcgtggaccgagtgaccgtggtttctgtgtggtgtcacctgccagacccgccgaagaagccacctctttggagggtgcgctctctggcacgcgccactcccacccatccgtgggccgccagcaccacgcgggccccccatccacatcgcggccaccacgtccctgggacacgccttgtcccccggtgtacgccgagaccaagcacttcctctactcctcaggcgacaaggagcagctgcggccctccttcctactcagctctctgaggcccagcctgactggcgctcggaggctcgtggagaccatctttctgggttccaggccctggatgccagggactccccgcaggttgccccgcctgccccagcgctactggcaaatgcggcccctgtttctggagctgcttgggaaccacgcgcagtgcccctacggggtgctcctcaagacgcactgcccgctgcgagctgcggtcaccccagcagccggtgtctgtgcccgggagaagccccagggctctgtggcggcccccgaggaggaggacacagacccccgtcgcctggtgcagctgctccgccagcacagcagcccctggcaggtgtacggcttcgtgcgggcctgcctgcgccggctggtgcccccaggcctctggggctccaggcacaacgaacgccgcttcctcaggaacaccaagaagttcatctccctggggaagcatgccaagctctcgctgcaggagctgacgtggaagatgagcgtgcgggactgcgcttggctgcgcaggagcccaggggttggctgtgttccggccgcagagcaccgtctgcgtgaggagatcctggccaagttcctgcactggctgatgagtgtgtacgtcgtcgagctgctcaggtctttcttttatgtcacggagaccacgtttcaaaagaacaggctctttttctaccggaagagtgtctggagcaagttgcaaagcattggaatcagacagcacttgaagagggtgcagctgcgggagctgtcggaagcagaggtcaggcagcatcgggaagccaggcccgccctgctgacgtccagactccgcttcatccccaagcctgacgggctgcggccgattgtgaacatggactacgtcgtgggagccagaacgttccgcagagaaaagagggccgagcgtctcacctcgagggtgaaggcactgttcagcgtgctcaactacgagcgggcgcggcgccccggcctcctgggcgcctctgtgctgggcctggacgatatccacagggcctggcgcaccttcgtgctgcgtgtgcgggcccaggacccgccgcctgagctgtactttgtcaaggtggatgtgacgggcgcgtacgacaccatcccccaggacaggctcacggaggtcatcgccagcatcatcaaaccccagaacacgtactgcgtgcgtcggtatgccgtggtccagaaggccgcccatgggcacgtccgcaaggccttcaagagccacgtcctacgtccagtgccaggggatcccgcagggctccatcctctccacgctgctctgcagcctgtgctacggcgacatggagaacaagctgtttgcggggattcggcgggacgggctgctcctgcgtttggtggatgatttcttgttggtgacacctcacctcacccacgcgaaaaccttcctcaggtgaggcccgtgcc

SEQ ID NO: 205 - DNA, 3458 bp, Homo sapiens
cctttgccttcggacttctccggggccagcagccgcccgaccaggggcccggggccacgggctcagccgacgaccatgggctccgtgtccaaccagcagtttgcaggtggctgcgccaaggcggcagaagaggcgcccgaggaggcgccggaggacgcggcccgggcggcggacgagcctcagctgctgcacggtgcgggcatctgtaagtggttcaacgtgcgcatggggttcggcttcctgtccatgaccgcccgcgccggggtcgcgctcgaccccccagtggatgtctttgtgcaccagagtaagctgcacatggaagggttccggagcttgaaggagggtgaggcagtggagttcacctttaagaagtcagccaagggtctggaatccatccgtgtcaccggacctggtggagtattctgtattgggagtgagaggcggccaaaaggaaagagcatgcagaagcgcagatcaaaaggagacaggtgctacaactgtggaggtctagatcatcatgccaaggaatgcaagctgccaccccagcccaagaagtgccacttctgccagagcatcagccatatggtagcctcatgtccgctgaaggcccagcagggccctagtgcacagggaaagccaacctactttcgagaggaagaagaagaaatccacagccctaccctgctcccggaggcacagaattgagccacaatgggtgggggctattcttttgctatcaggaagttttgaggagcaggcagagtggagaaagtgggaatagggtgcattggggctagttggcactgccatgtatctcaggcttgggttcacaccatcaccctttcttccctctaggtggggggaaagggtgagtcaaaggaactccaaccatgctctgtccaaatgcaagtgagggttctgggggcaaccaggaggggggaatcaccctacaacctgcatactttgagtctccatccccagaatttccagcttttgaaagtggcctggatagggaagttgttttccttttaaagaaggatatataataattcccatgccagagtgaaatgattaagtataagaccagattcatggagccaagccactacattctgtggaaggagatctctcaggagtaagcattgtttttttttcacatcttgtatcctcatacccacttttgggatagggtgctggcagctgtcccaagcaatgggtaatgatgatggcaaaaagggtgtttgggggaacagctgcagacctgctgctctatgctcacccccgccccattctgggccaatgtgattttatttatttgctcccttggatactgcaccttgggtcccactttctccaggatgccaactgcactagctgtgtgcgaatgacgtatcttgtgcattttaactttttttccttaatataaatattctggttttgtatttttgtatattttaatctaaggccctcatttcctgcactgtgttctcaggtacatgagcaatctcagggatagccagcagcagctccaggtctgcgcagcaggaattactttttgttgtttttgccaccgtggagagcaactatttggagtgcacagcctattgaactacctcatttttgccaataagagctggcttttctgccatagtgtcctcttgaaaccccctctgccttgaaaatgttttatgggagactaggttttaactgggtggccccatgacttgattgccttctactggaagattgggaattagtctaaacaggaaatggtggtacacagaggctaggagaggctgggcccggtgaaaaggccagagagcaagccaagattaggtgagggttgtctaatcctatggcacaggacgtgctttacatctccagatctgttcttcaccagattaggttaggcctaccatgtgccacagggtgtgtgtgtgtttgtaaaactagagttgctaaggataagtttaaagaccaatacccctgtacttaatcctgtgctgtcgagggatggatatatgaagtaaggtgagatccttaacctttcaaaattttcgggttccagggagacacacaagcgagggttttgtggtgcctggagcctgtgtcctgccctgctacagtagtgattaatagtgtcatggtagctaaaggagaaaaagggggtttcgtttacacgctgtgagatcaccgcaaacctaccttactgtgttgaaacgggacaaatgcaatagaacgcattgggtggtgtgtgtctgatcctgggttcttgtctcccctaaatgctgccccccaagttactgtatttgtctgggctttgtaggacttcactacgttgattgctaggtggcctagtttgtgtaaatataatgtattggtctttctccgtgttctttgggggttttgtttacaaacttctttttgtattgagagaaaaatagccaaagcatctttgacagaaggttctgcaccaggcaaaaagatctgaaacattagtttggggggccctcttcttaaagtggggatcttgaaccatcctttcttttgtattccccttcccctattacctattagaccagatcttctgtcctaaaaacttgtcttctaccctgccctcttttctgttcacccccaaaagaaaacttacacacccacacacatacacatttcatgcttggagtgtctccacaactcttaaatgatgtatgcaaaaatactgaagctaggaaaaccctccatcccttgttcccaacctcctaagtcaagaccattaccatttctttctttcttttttttttttttttaaaatggagtctcactgtgtcacccaggcagaggttgcagtgagctgagatcgcaccactgcactccagcctggttacagagcaagactctgtctcaaacaaaacaaaacaaaacaaaaacacactactgtattttggatggatcaaacctccttaattttaatttctaatcctaaagtaaagagatgcaattgggggccttccatgtagaaagtggggtcaggaggccaagaaagggaatatgaatgtatatccaagtcactcaggaacttttatgcaggtgctagaaactttatgtcaaagtggccacaagattgtttaataggagacgaacgaatgtaactccatgtttactgctaaaaaccaaagctttgtgtaaaatcttgaatttatggggcgggagggtaggaaagcctgtacctgtctgtttttttcctgatccttttccctcattcctgaactgcaggagactgagcccctttgggctttggtgaccccatcactggggtgtgtttatttgatggttgattttgctgtactgggtacttcctttcccattttctaatcattttttaacacaagctgactcttcccttcccttctcctttccctgggaaaatacaatgaataaataaagacttattggtacgc

SEQ ID NO: 206 - DNA, 4008 bp, Homo sapiens
gtgcgggggaagatgtagcagcttcttctccgaaccaaccctttgccttcggacttctccggggccagcagccgcccgaccaggggcccggggccacgggctcagccgacgaccatgggctccgtgtccaaccagcagtttgcaggtggctgcgccaaggcggcagaagaggcgcccgaggaggcgccggaggacgcggcccgggcggcggacgagcctcagctgctgcacggtgcgggcatctgtaagtggttcaacgtgcgcatggggttcggcttcctgtccatgaccgcccgcgccggggtcgcgctcgaccccccagtggatgtctttgtgcaccagagtaagctgcacatggaagggttccggagcttgaaggagggtgaggcagtggagttcacctttaagaagtcagccaagggtctggaatccatccgtgtcaccggacctggtggagtattctgtattgggagtgagaggcggccaaaaggaaagagcatgcagaagcgcagatcaaaaggagacaggtgctacaactgtggaggtctagatcatcatgccaaggaatgcaagctgccaccccagcccaagaagtgccacttctgccagagcatcagccatatggtagcctcatgtccgctgaaggcccagcagggccctagtgcacagggaaagccaacctactttcgagaggaagaagaagaaatccacagccctaccctgctcccggaggcacagaattgagccacaatgggtgggggctattcttttgctatcaggaagttttgaggagcaggcagagtggagaaagtgggaatagggtgcattggggctagttggcactgccatgtatctcaggcttgggttcacaccatcaccctttcttccctctaggtggggggaaagggtgagtcaaaggaactccaaccatgctctgtccaaatgcaagtgagggttctgggggcaaccaggaggggggaatcaccctacaacctgcatactttgagtctccatccccagaatttccagcttttgaaagtggcctggatagggaagttgttttccttttaaagaaggatatataataattcccatgccagagtgaaatgattaagtataagaccagattcatggagccaagccactacattctgtggaaggagatctctcaggagtaagcattgtttttttttcacatcttgtatcctcatacccacttttgggatagggtgctggcagctgtcccaagcaatgggtaatgatgatggcaaaaagggtgtttgggggaacagctgcagacctgctgctctatgctcacccccgccccattctgggccaatgtgattttatttatttgctcccttggatactgcaccttgggtcccactttctccaggatgccaactgcactagctgtgtgcgaatgacgtatcttgtgcattttaactttttttccttaatataaatattctggttttgtatttttgtatattttaatctaaggccctcatttcctgcactgtgttctcaggtacatgagcaatctcagggatagccagcagcagctccaggtctgcgcagcaggaattactttttgttgtttttgccaccgtggagagcaactatttggagtgcacagcctattgaactacctcatttttgccaataagagctggcttttctgccatagtgtcctcttgaaaccccctctgccttgaaaatgttttatgggagactaggttttaactgggtggccccatgacttgattgccttctactggaagattgggaattagtctaaacaggaaatggtggtacacagaggctaggagaggctgggcccggtgaaaaggccagagagcaagccaagattaggtgagggttgtctaatcctatggcacaggacgtgctttacatctccagatctgttcttcaccagattaggttaggcctaccatgtgccacagggtgtgtgtgtgtttgtaaaactagagttgctaaggataagtttaaagaccaatacccctgtacttaatcctgtgctgtcgagggatggatatatgaagtaaggtgagatccttaacctttcaaaattttcgggttccagggagacacacaagcgagggttttgtggtgcctggagcctgtgtcctgccctgctacagtagtgattaatagtgtcatggtagctaaaggagaaaaagggggtttcgtttacacgctgtgagatcaccgcaaacctaccttactgtgttgaaacgggacaaatgcaatagaacgcattgggtggtgtgtgtctgatcctgggttcttgtctcccctaaatgctgccccccaagttactgtatttgtctgggctttgtaggacttcactacgttgattgctaggtggcctagtttgtgtaaatataatgtattggtctttctccgtgttctttgggggttttgtttacaaacttctttttgtattgagagaaaaatagccaaagcatctttgacagaaggttctgcaccaggcaaaaagatctgaaacattagtttggggggccctcttcttaaagtggggatcttgaaccatcctttcttttgtattccccttcccctattacctattagaccagatcttctgtcctaaaaacttgtcttctaccctgccctcttttctgttcacccccaaaagaaaacttacacacccacacacatacacatttcatgcttggagtgtctccacaactcttaaatgatgtatgcaaaaatactgaagctaggaaaaccctccatcccttgttcccaacctcctaagtcaagaccattaccatttctttctttcttttttttttttttttaaaatggagtctcactgtgtcacccaggctggagtgcagtggcatgatcggctcactgcagcctctgcctcttgggttcaagtgattctcctgcctcagcctcctgagtagctgggatttcaggcacccgccacactcagctaatttttgtatttttagtagagacggggtttcaccatgttgtccaggctggtctggaactcctgacctcaggtgatctgcccaccttggcttcccaaagtgctgggattacaggcatgagccaccatgctgggccaaccatttcttggtgtattcatgccaaacacttaagacactgctgtagcccaggcgcggtggctcacacctgtaatcccagcactttggaaggctgaggcgggcggatcacaaggtcacgagttcaaaactatcctggccaacacagtgaaaccccgtctctactaaaatacaaaaaaattagccgggtgtggtggtgcatgcctttagtcctagctattcaggaggctgaggcaggggaatcgcttgaacccgagaggcagaggttgcagtgagctgagatcgcaccactgcactccagcctggttacagagcaagactctgtctcaaacaaaacaaaacaaaacaaaaacacactactgtattttggatggatcaaacctccttaattttaatttctaatcctaaagtaaagagatgcaattgggggccttccatgtagaaagtggggtcaggaggccaagaaagggaatatgaatgtatatccaagtcactcaggaacttttatgcaggtgctagaaactttatgtcaaagtggccacaagattgtttaataggagacgaacgaatgtaactccatgtttactgctaaaaaccaaagctttgtgtaaaatcttgaatttatggggcgggagggtaggaaagcctgtacctgtctgtttttttcctgatccttttccctcattcctgaactgcaggagactgagcccctttgggctttggtgaccccatcactggggtgtgtttatttgatggttgattttgctgtactgggtacttcctttcccattttctaatcattttttaacacaagctgactcttcccttcccttctcctttccctgggaaaatacaatgaataaataaagacttattggtacgcaaa

SEQ ID NO: 207 - DNA, 5505 bp, Homo sapiens
aattgacaaagtcacgtgtgctcagggggccagaaactggagagaggagagaaaaaaatcaaaagaaggaaagcacattagaccatgcgagctaaatttgtgatcgcacaaaatcaagatgttagattgatgcagaagatcactccgttccaaagggaaagttttcatctcacgagtttggagctgagggcccgtggggcaacatggccgaaggcggggctagcaaaggtggtggagaagagcccgggaagctgccggagccggcagaggaggaatcccaggttttgcgcggaactggccactgtaagtggttcaatgtgcgcatgggatttggattcatctccatgataaaccgagagggaagccccttggatattccagtcgatgtatttgtacaccaaagcaaactattcatggaaggatttagaagcctaaaagaaggagaaccagtggaattcacatttaaaaaatcttccaaaggccttgagtcaatacgggtaacaggacctggtgggagcccctgtttaggaagtgaaagaagacccaaagggaagacactacagaaaagaaaaccaaagggagatagatgctacaactgtggtggccttgatcatcatgctaaggaatgtagtctacctcctcagccaaagaagtgccattactgtcagagcatcatgcacatggtggcaaactgcccacataaaaatgttgcacagccacccgcgagttctcagggaagacaggaagcagaatcccagccatgcacttcaactctccctcgagaagtgggaggcgggcatggctgtacatcaccaccgtttcctcaggaggctagggcagagatctcagaacggtcaggcaggtcacctcaagaagcttcctccacgaagtcatctatagcaccagaagagcaaagcaaaaaggggccttcagttcaaaaaaggaaaaagacataacaggtcttcttcatatgttctttcctttacccggttgcaaagtctacctcatgcaagtataggggaacagtatttcacaagcagtagctgacctgggattttaactactattggggaactgtgaattttttaaacagacaaatcactctaagcaaattacatttgagcagggtgtcatgttttatgttaattcagagaataagatactatgtctgtcaatatgtgcatgtgtgagagggagagagcctgagtctgtgtgtgtacatgaggatttttatataggaatgtagacacatatataaagaggctttgtctttatatatttgtgtatagatcaaagcacacaccctctctcatataattggatatttccaagaattgaaaacccatgtgaagcattatagatagttttaaatttaacccactggagttttcttgaaataccacttcttttatattatataaaactaaaaacacgactgttaccttttgtgtgaaccaaaggatacttcagatctcagagctgccaattatggggtactaaaggtttttaagacatccagttctcccgaatttgggattgcctctttttcttgaaatctctggagtagtaatttttttcccccttttttgaaggcagtaccttaacttcatatgcctctgactgccataagcttttttgattctgggataacataactccagaaaagacaatgaatgtgtaatttgggccgatatttcactgttttaaattctgtgtttaattgtaaaattagatgcctattaagagaaatgaaggggaggatcatcttagtggcttgttttcagtagtattttaatatcagcttcttgtaaccttttccatgttgtgagggttgtaagggattgtgtggcaacagcagcttcccttggctaactcaatcttctacccattgcttagagcagggagccctccttatttactactgaagaccttagagaactccaattgtttggcatatatttttggtggtggtttttattcctcctggagagttatctaatttgtttctaaaacaaacaagcagcaaagaaatgaattaaatactggggttgagaattaaaattaagtggatgttcacagttgcccaatatatatgacctgcaaatgatacgaaaaagtgcagcatttagtggcagttaacaagagtgacaagcctggggcagaggtaccaaacctctcccaccagagagctagaagtattttatacagtaactttgatcttatggaagtgaccttcaatgcttattctgaagtaacctatatggtggatacaggatgaacattcagtgccagggagaatcttctcaggttggttctcgttagagtgataaactggctaggggccatagtattggtcctgttaggtttcggtcatggaaaaaaaaattattttggggtcatcctggctctagatgttatgggcaaatttctgaaacatctgcaagaaggtaccagttaattatagtgcttaatattgggaataagattaagcattataattataatgtatgggcctgttggtgtaagctcagataattaaataaaaatagcatgactcaaatgagacatattctgctgaacagtttctacttcctctcccgcctgtcctgtcatgggagacgtgtatagttgctgctgtttcagcaaaccaccataagacgaaaatgcctcaggttgggttgccagtcctttacaactcagcttgaatttcacaacagtgattgtgagaatctgcgtggtatacactgaaatatcggtgtgctgtgatgcaaagcttacctttgacgatattgaatgtgatatagctgtagagaagtacttccttgccttatgtgaggatttcaaacttatttaaattatgtagacaaatcaaagtggcattgcttaatttttagcaggcataataagcaagttaacagtaaaatgcaaaacatgataagcgttgctcaatttttagcaggtataataagcaggttaacagtaaaaatgcaaaacatgatagataagtcactttgaaaattcaaaccaaagttccttcaccttatggaaataggaaattatggacttcaaaattggacacttcctgtttacaaaaagaaattcagagctaaaatcatggtaaaaaaaaatagaaacacttgagaactatggtctttatgggtgcaatttgaaatccttttcatcatcttaccagactaaactaagagcacataccaaacctatcttatggttgaaagttggggtttattttttatatgagaatattatcactattacataacatactcaggacaaagaactttgctcagggaacataccatgtaatatttttgttgtttctttacagactagtctacagtcctgcttactcaaaacaaaccaaataacttatacctttatataagtattatgtactgatgatagtaactacctctgagtttgacacagatcaaaatttttgaatatcagatatcagttatcctatttttatttcatgtgaaaactcctctaaagcagattccctcaactctgtgcatatgtgaatatcactgatgtgaacacattgttcatttacataggtaaaatattactctgtttacagcaaaaggctacctcatagttgatacatagcacacctgtatgtatgctgttccagccttacaggtggctgataattctctggtacagaacctttttatctgtattataaatagcaattcacaactgcatgtttctgacaaacacttgtgaataatgaagcatctcgttttagttagcaaagtctccaaacatttccttaaaataatcatgtatttagtttaaagaattatgggcactgttcaacttaagcaaaacagaacacggaagcagtcttagaagcaccactttgcccagaggtggaggttggaaggggtagcagggagaggggttggtgtatgcaggtattcatgctaggcaaagagtttaaaagacgccaatgtccttcatttactgtctgtgctgccctgaagccaagcgtattgcagcattatagccccaggcacataactaactagcactggcttgccaaggaatgaacatgcaatgccattactagctattgagggaaaagggtctgtgtgaagcatcactttgcagggattactaatggtggggcagcaggtctgtgaattaagttatctcttgacctcaccctcatgtcaacacaaatgtaattcctaaacaagatgcattgccagtctcttagccctgtaagctgatcttttgctacatggcagactataatgaaaacatttttatacttgggtttctagtcttcactagaaggccttggatgtatttttgcagttgaaagatttagaaagatttttacctgcttataacttggaagtttagagtgcaatgtaagaaaaaagatcaagaaatgtcatgttattagcatcagtccacctccaatattgccgatactttttttattctggctcagttttattttgcaccagtgcggccccaagttactgctggttgtatttagtttgtgaataggagcccataagtgttaatagactttgtaacattcactataagatgaattatacaggacatgggaaatctcattaagtcttaaagttaatttaaattaatttatctgttttctctaagaaatgtttatcataaaatatatatgtgtatttcccctttggttataaaatttgggaaagtatgtacaagtgcagctgcactgactttaattttctagatgtcttaatgagatttatttgttttagagaagaacatcttgttaaaagcatcaaactctgtcttacatagctgtcaacagcctctttaagatgtggtggttgtatgatctgtgtcttaattgttcagttagagtgagaagttgacctatgattcatttttaaattttatatttggaacaaagctgcaagttatggtaaagtactgtactgtgagaagtattatgatatttaatgcatctgtggcttaacacttgtgagagttaccagcttgaaaatgatggtgttgactacctcttgaatcacatctatcaaccactggcacctaccaccaagctggcttcaattagtatgtgttgctttttggtattaacaactaaccgtactagagaccaaagtgaaccctgatttttatatgtctttaataatggtgttttatctagtgtttttaaattatcctgtgtagtatttagattacctcattgtccattttgactcatgttgtttacaagtgaaaataaaaacacttgaactgtatgtttttaaaagacaaaaaaggggtagatgtttggaatgcgtttcactcgcatgcagtcatctggagggactgaagcactgtttgcctttctgtacactctgggttttatattctcatttcatgcctaatgtcttattctgtcaattatggatatgttgaggtttaaaaaaattacttgattaaaaataaaacatataacgttggcattta

SEQ ID NO: 208 - DNA, 2472 bp, Homo sapiens
cttctggccagggaacgtggaaggcgcaccgacagggatccggccagggagggcgagtgaaagaaggaaatcagaaaggaagggagttaacaaaataataaaaacagcctgagccacggctggagagaccgagacccggcgcaagagagcgcagccttagtaggagaggaacgcgagacgcggcagagcgcgttcagcactgacttttgctgctgcttctgcttttttttttcttagaaacaagaaggcgccagcggcagcctcacacgcgagcgccacgcgaggctcccgaagccaacccgcgaagggaggaggggagggaggaggaggcggcgtgcagggaggagaaaaagcattttcactttttttgctcccactctaagaagtctcccggggattttgtatatattttttaacttccgtcagggctcccgcttcatatttccttttctttccctctctgttcctgcacccaagttctctctgtgtccccctcgcgggccccgcacctcgcgtcccggatcgctctgattccgcgactccttggccgccgctgcgcatggaaagctctgccaagatggagagcggcggcgccggccagcagccccagccgcagccccagcagcccttcctgccgcccgcagcctgtttctttgccacggccgcagccgcggcggccgcagccgccgcagcggcagcgcagagcgcgcagcagcagcagcagcagcagcagcagcagcagcaggcgccgcagctgagaccggcggccgacggccagccctcagggggcggtcacaagtcagcgcccaagcaagtcaagcgacagcgctcgtcttcgcccgaactgatgcgctgcaaacgccggctcaacttcagcggctttggctacagcctgccgcagcagcagccggccgccgtggcgcgccgcaacgagcgcgagcgcaaccgcgtcaagttggtcaacctgggctttgccacccttcgggagcacgtccccaacggcgcggccaacaagaagatgagtaaggtggagacactgcgctcggcggtcgagtacatccgcgcgctgcagcagctgctggacgagcatgacgcggtgagcgccgccttccaggcaggcgtcctgtcgcccaccatctcccccaactactccaacgacttgaactccatggccggctcgccggtctcatcctactcgtcggacgagggctcttacgacccgctcagccccgaggagcaggagcttctcgacttcaccaactggttctgaggggctcggcctggtcaggccctggtgcgaatggactttggaagcagggtgatcgcacaacctgcatctttagtgctttcttgtcagtggcgttgggagggggagaaaaggaaaagaaaaaaaaaagaagaagaagaagaaaagagaagaagaaaaaaacgaaaacagtcaaccaaccccatcgccaactaagcgaggcatgcctgagagacatggctttcagaaaacgggaagcgctcagaacagtatctttgcactccaatcattcacggagatatgaagagcaactgggacctgagtcaatgcgcaaaatgcagcttgtgtgcaaaagcagtgggctcctggcagaagggagcagcacacgcgttatagtaactcccatcacctctaacacgcacagctgaaagttcttgctcgggtcccttcacctcctcgccctttcttaaagtgcagttcttagccctctagaaacgagttggtgtctttcgtctcagtagcccccaccccaataagctgtagacattggtttacagtgaaactatgctattctcagccctttgaaactctgcttctcctccagggcccgattcccaaaccccatggcttccctcacactgtcttttctaccattttcattatagaatgcttccaatcttttgtgaattttttattataaaaaatctatttgtatctatcctaaccagttcggggatatattaagatatttttgtacataagagagaaagagagagaaaaatttatagaagttttgtacaaatggtttaaaatgtgtatatcttgatactttaacatgtaatgctattacctctgcatattttagatgtgtagttcaccttacaactgcaattttccctatgtggttttgtaaagaactctcctcataggtgagatcaagaggccaccagttgtacttcagcaccaatgtgtcttactttatagaaatgttgttaatgtattaatgatgttattaaatactgttcaagaagaacaaagtttatgcagctactgtccaaactcaaagtggcagccagttggttttgataggttgccttttggagatttctattactgcctttttttttcttactgttttattacaaacttacaaaaatatgtataaccctgttttatacaaactagtttcgtaataaaactttttcctttttttaaaatgaaaataa

SEQ ID NO: 209 - DNA, 4081 bp, Homo sapiens
agtaatagcaggagcagcaacagaaggcgtcggagcgggcgtcggagctgcccgctgtgggagagagaggagacagaaagagcgagcgaggagagggagcccgaggcgaaaaagtaactgtcaaatgcgcggctcctttaaccggagcgctcagtccggctccgagagtcatggcgaccgcagcgtctaaccactacagcctgctcacctccagcgcctccatcgtgcacgccgagccgcccggcggcatgcagcagggcgcggggggctaccgcgaagcgcagagcctggtgcagggcgactacggcgctctgcagagcaacggacacccgctcagccacgctcaccagtggatcaccgcgctgtcccacggcggcggcggcgggggcggtggcggcggcggggggggcgggggcggcggcgggggcggcggcgacggctccccgtggtccaccagccccctgggccagccggacatcaagccctcggtggtggtgcagcagggcggccgcggagacgagctgcacgggccaggcgccctgcagcagcagcatcagcagcagcaacagcaacagcagcagcaacagcagcaacagcagcagcagcagcagcaacagcggccgccgcatctggtgcaccacgccgctaaccaccacccgggacccggggcatggcggagcgcggcggctgcagcgcacctcccaccctccatgggagcgtccaacggcggcttgctctactcgcagcccagcttcacggtgaacggcatgctgggcgccggcgggcagccggccggtctgcaccaccacggcctgcgggacgcgcacgacgagccacaccatgccgaccaccacccgcacccgcactcgcacccacaccagcagccgccgcccccgccgcccccgcagggtccgcctggccacccaggcgcgcaccacgacccgcactcggacgaggacacgccgacctcggacgacctggagcagttcgccaagcagttcaagcagcggcggatcaaactgggatttacccaagcggacgtggggctggctctgggcaccctgtatggcaacgtgttctcgcagaccaccatctgcaggtttgaggccctgcagctgagcttcaagaacatgtgcaagctgaagcctttgttgaacaagtggttggaggaggcggactcgtcctcgggcagccccacgagcatagacaagatcgcagcgcaagggcgcaagcggaaaaagcggacctccatcgaggtgagcgtcaagggggctctggagagccatttcctcaaatgccccaagccctcggcccaggagatcacctccctcgcggacagcttacagctggagaaggaggtggtgagagtttggttttgtaacaggagacagaaagagaaaaggatgacccctcccggagggactctgccgggcgccgaggatgtgtacggggggagtagggacactccaccacaccacggggtgcagacgcccgtccagtgaactcgagctgggggaggggcagagcgcggggctccccctccccttcggtccttggccctttcccggccctcttgttccctctctaacttctgattgttcttttatttttaattattatttccccgtcccttaaaaagacaaaaaaaataaggcaaaaggaaagcaactaagacactggactatcctttaaaggtagcaggtgtaatgatgtgttttgacctttgcaggcgagtaaccaggcaatggagtggagtgtctcctggagagagtgaggagagtgtgtgatagctagaaagagagagagacagagagatggcaagcactgagataaatacctggcaaaactaaataaattaccaaaaaggaaaaaaaatccaccaaaccatgataaacacaaaatgcagcttcctgatgcttagagttggcacatgctgctgtgtttatttattgtggattcccatcaggaaagaggaaaaaatacacatgttctttcatataggcaaaatttaaccacataaatttgcactgcaagaaaattgaagtttacgtgaacaaattcatgagcatattttctctttctccccaccgttaatttgggagttgccgttttgggggattttgttttgctttgctttattcatcggagagagttgaagccagctcttggccactctccatttctaatgttcttgtgttgccccttcttcgtactgtttgtgaactttggttaccttcacattccccttacgagggtgtaacatctatttgttcctcttaccaaagcaaaaggattggcttcatacaaaatagacaattctctgatttcaggaaatgtgcatggtctacccgctttatcgaaggcaagaatccggtttggaatataaaaataagcattggttgttcttaccagccacaaagtaaacttcattttcaggcagtgtttctgggggaggttatggagggaagaaaaaagaaaaatcgatagtgagtgactgattgcttcattttatcaggcgggcccattgtgaaagagctcaggggaaatgtggaggttaaatatatttccagagttgtccagcagaaagaaagtggcactttgaagagaactagggaagtacatatcttcagatatccctatatagttctctaccttcagttttagtaacaattatgaagaattatttgtgctgacagcagcagttaaactttgtttctctaatagctttttttttacataaaaaaagacccaggaacttaatagtgtatgcataagactgtgttttttagcacacagatacccacagcatacactgacgatctccacgcagtagacaggttttgtcttcactagctcatttgtttatcaagtcatatttagggtcccacaccctcttttcctgtaatttattgcagaatacaccactttgacttggacagctttctgccccctctttcactaaggaaggcaaatgaagtgaaaaaaaaaaatgccattttcaatccttcctttctcccctttgttaatagttttaagtgaatttttgaccttatcttaatggaaaacggttaactccaaacacaaaagactctactggaaagtgtaggtgaaaaaacttgtaactgtattgaaaataaataccattaaactgtgatcagttaaaatttaaaagaaaaatcagcacaaaagggcgctaaaagggaaaacactttttattaatcttaaaagtttgggggtttttttccagttaggtattagataaatttttattttaaaaaatgaaagtctcactaccataaaattatggttcagcatcagattagcattgcactcagtagtctttaaggttttaggaaatatgctttatattgtcttttcaaacacctgtgattgtttcattttccatgtttttgcaagataaatggtgacttataatgggcatatttatttgcctgtatttcatttcccccaatgaatgtcacaaggagatgggcacggagctgcttcgggtgcatcacgctgctcgttcctgaggtatgggaactggcctttagtgaagctatccagagcagggcaaatagccactggtaaagggaggaaatgaatttccagatacttattaccaagtaggtaaggtcagaagctggagttcagagaatgtgtctacagcttctctgactcttataggtttactaagatgaaagttaccactgaaccttaccactatgtatatatgtttaatatctgtcttttgaaatgcagaaatagtttaaatgtttctttgtctatttttctttttttttaatgctacccagggaaatattttcatatcatttttaagtggcctgcctcaatgtatatttatttcttttgaaacaaaaaggttctggaaactgtttttctgtagctttaaatgaataggtgagcaaaatctatatgggatgtaatttttttgttcagtctcttaaaaaatactttgttttggtacatttggttgtgcttgtggggaaaataaaaacgcagagatccttatatatttatgttaaagtaatattttattatctacataaaacagaaatgc

SEQ ID NO: 210 - DNA, 1131 bp, Homo sapiens
atggcgaccgcagcgtctaaccactacagcctgctcacctccagcgcctccatcgtgcacgccgagccgcccggcggcatgcagcagggcgcggggggctaccgcgaagcgcagagcctggtgcagggcgactacggcgctctgcagagcaacggacacccgctcagccacgctcaccagtggatcaccgcgctgtcccacggcggcgacggctccccgtggtccaccagccccctgggccagccggacatcaagccctcggtggtggtgcagcagggcggccgcggagacgagctgcacgggccaggcgccctgcagcagcagcatcagcagcagcaacagcaacagcagcagcaacagcagcaacagcagcagcagcagcagcaacagcggccgccgcatctggtgcaccacgccgctaaccaccacccgggacccggggcatggcggagcgcggcggctgcagcgcacctcccaccctccatgggagcgtccaacggcggcttgctctactcgcagcccccgccgcccccgcagggtccgcctggccacccaggcgcgcaccacgacccgcactcggacgaggacacgccgacctcggacgacctggagcagttcgccaagcagttcaagcagcggcggatcaaactgggatttacccaagcggacgtggggctggctctgggcaccctgtatggcaacgtgttctcgcagaccaccatctgcaggtttgaggccctgcagctgagcttcaagaacatgtgcaagctgaagcctttgttgaacaagtggttggaggaggcggactcgtcctcgggcagccccacgagcatagacaagatcgcagcgcaagggcgcaagcggaaaaagcggacctccatcgaggtgagcgtcaagggggctctggagagccatttcctcaaatgccccaagccctcggcccaggagatcacctccctcgcggacagcttacagctggagaaggaggtggtgagagtttggttttgtaacaggagacagaaagagaaaaggatgacccctcccggagggactctgccgggcgccgaggatgtgtacggggggagtagggacactccaccacaccacggggtgcagacgcccgtccagtga

SEQ ID NO: 211 - DNA, 4850 bp, Homo sapiens
tttctgcgtcttggtggcatgcatgtgtctcatcatcctttcaaacttgtggtggaacagggttttcttccctgtctgtgtattttgagccagcacagttaccaaaattgaacttgtctttcgcttgtgagcggttgtggtcattgtgagggcgggtcatgaggaggctgtagccaaggacgaggtgtgtgcggctgttgcctggacgtttgtccaatccacgttgacatttgagggatcacagcgtgtgaaaatgaactcagaggagaattggtgaattcctatccagtgggcatcttcaaaccctggtcgacggcggaagaatatcaggtcctgagatcacccacccggcgcggcaacagtgcagagtggccacatctggtggaagaagaaaaaaatgtagttattgaattcaatcaagtgtttgcatctttcaagctatcaacaaaattccatcaagaaaggttccagttggtctcacagacgtatggatatccgaggagccacctaaagatggagaaatcaaggcatagagagattaagtgactttgccacagtcacaagctggagaggaccaggagtagagcttagagcgagcccctgactctgggcctgcgtcctgccaggagtcacgctgcctccgttcctaggagagaagacttcctgtaagatggaggtggacaccgaggagaagcggcatcgcacgcggtccaaaggggttcgagttcccgtggaaccagccatacaagagctgttcagctgtcccacccctggctgtgacggcagtggtcatgtcagtggcaaatatgcaagacacagaagtgtatatggttgtcccttggcgaaaaaaagaaaaacacaagataaacagccccaggaacctgctcctaaacgaaagccatttgccgtgaaagcagacagctcctcagtggatgagtgtgacgacagtgatgggactgaggacatggatgagaaggaggaggatgagggggaggagtactccgaggacaatgatgagccaggggatgaggacgaggaggacgaggagggggaccgggaggaggaggaggagatcgaggaggaggatgaggacgatgacgaggatggagaagatgtggaggatgaagaagaggaagaggaggaggaggaggaggaggaagaggaagaagaaaacgaagaccatcaaatgaattgtcacaatactcgaataatgcaagacacagaaaaggatgataacaataatgacgaatatgacaattacgatgaactggtggccaagtcattgttaaacctcggcaaaatcgctgaggatgcagcctaccgggccaggactgagtcagaaatgaacagcaatacctccaatagtctggaagacgatagtgacaaaaacgaaaacctgggtcggaaaagtgagttgagtttagacttagacagtgatgttgttagagaaacagtggactcccttaaactattagcccaaggacacggtgttgtgctctcagaaaacatgaatgacagaaattatgcagacagcatgtcgcagcaagacagtagaaatatgaattacgtcatgttggggaagcccatgaacaacggactcatggaaaagatggtggaggagagcgatgaggaggtgtgtctgagcagtctggagtgtttgaggaatcagtgcttcgacctggccaggaagctcagtgagaccaacccgcaggagaggaatccgcagcagaacatgaacatccgtcagcatgtccggccagaagaggacttccccggaaggacgccggacagaaactactcggacatgctgaacctcatgcggctggaggagcagttgagcccccggtcgagagtgtttgccagctgtgcgaaggaggatgggtgtcatgagcgggacgacgataccacctctgtgaactcggacaggtctgaagaggtgttcgacatgaccaaggggaacctgaccctgctggagaaagccatcgctttggaaacggaaagagcaaaggccatgagggagaagatggccatggaagctgggaggagggacaatatgaggtcatatgaggaccagtctccgagacaacttcccggggaggacagaaagcctaaatccagtgacagccatgtcaaaaagccatactatgatccctcaagaacagaaaagaaagagagcaagtgtccaacccccgggtgtgatggaaccggccacgtaactgggctgtacccacatcaccgcagcctgtccggatgcccgcacaaagatagggtccctccagaaatccttgccatgcatgaaagtgtcctcaagtgccccactccgggctgcacggggcgcgggcatgtcaacagcaacaggaactcccaccgaagcctctccggatgcccgatcgctgcagcagagaaactggccaaggcacaggaaaagcaccagagctgcgacgtgtccaagtccagccaggcctcggaccgcgtgctcaggccaatgtgctttgtgaagcagctggagattcctcagtatggctacagaaacaatgtccccacaactacgccgcgttccaacctggccaaggagctcgagaaatattccaagacctcgtttgaatacaacagttacgacaaccatacttatggcaagcgagccatagctcccaaggtgcaaaccagggatatatcccccaaaggatatgatgatgcgaagcggtactgcaaggaccccagccccagcagcagcagcaccagcagctacgcgcccagcagcagcagcaacctgagctgcggcgggggcagcagcgccagcagcacgtgcagcaagagcagcttcgactacacgcacgacatggaggcggcccacatggcggccaccgccatcctcaacctgtccacgcgctgccgcgagatgccgcagaacctgagcaccaagccgcaggacctgtgcgccacgcggaaccctgacatggaggtggatgagaacgggaccctggacctcagcatgaacaagcagaggccgcgggacagctgctgccccatcctgacccctctggagcccatgtccccccagcagcaggcagtgatgaacaaccggtgtttccagctgggcgagggcgactgctgggacttgcccgtagactacaccaaaatgaaaccccggaggatagacgaggacgagtccaaagacattactccagaagacttggacccattccaggaggctctagaagaaagacggtatcccggggaggtgaccatcccaagtcccaaacccaagtaccctcagtgcaaggagagcaaaaaggacttaataactctgtctggctgccccctggcggacaaaagcattcgaagtatgctggccaccagctcccaagaactcaagtgccccacgcctggctgtgatggttctggacatatcaccggcaattatgcttctcatcggagcctttcaggttgcccaagagcaaagaaaagtggtatcaggatagcacagagcaaagaagataaagaagatcaagaacccatcaggtgtccggtccccgggtgcgacggccagggccacatcactgggaagtacgcgtcccatcgcagcgcctccgggtgccccttggcggccaagaggcagaaagacgggtacctgaatggctcccagttctcctggaagtcggtcaagacggaaggcatgtcctgccccacgccaggatgcgacggctcaggccacgtcagcggcagcttcctcacacaccgcagcttgtcaggatgcccgagagccacgtcagcgatgaagaaggcaaagctttctggagagcagatgctgaccatcaaacagcgggccagcaacggtatagaaaatgatgaagaaatcaaacagttagatgaagaaatcaaggagctaaatgaatccaattcccagatggaagccgatatgattaaactcagaactcagattaccacgatggagagcaacctgaagaccatcgaagaggagaacaaagtgattgagcagcagaacgagtctctcctccacgagctggcgaacctgagccagtctctgatccacagcctggctaacatccagctgccgcacatggatccaatcaatgaacaaaattttgatgcttacgtgactactttgacggaaatgtatacaaatcaagatcgttatcagagtccagaaaataaagccctactggaaaatataaagcaggctgtgagaggaattcaggtctgaacagctgctgtagtgatgaaactcttgcttaaaaaggatgcctcttgttttttgctgctgtaacttaccagaaagtgttctatatttatttctgtttgaatttgaaacagtgttatgcttacaagacttcataatgattttatgtcttgctttaaagatagtacctgcagaatagtttttgaatacacccacattttgtacgtttccatgtaagctgacatagtgttctgccatgtaatgtttatagctgctgatgtatgcacatttgggggtatatctatttctgaagaggtaagctgatcaaaataaatagagtgtaaattctttttaatgctttagtgattaaatgttttagtattttgaactgaaatggacacacaaacacacacacgcacacacagacccacagctttgaatgatcatgttgtggctgagcagccgctttttagacgttatcattttgcctcatgttggaggactttatggaatttaagaaatacattttgtgtgcatattgtttcatagcaagaattcgttgcaaaaatgctttatttttgaacaatgcttggaaatattatgtgacttttttgtttgtttgttttaggaggatggtgtatggtggggg

SEQ ID NO: 212 - DNA, 6953 bp, Homo sapiens
cagtgagagagcttttccctgcagtcttgttgaagcaccccgggttttttgctcattgttggtgggtgcattttaattttttcattccctggactatgggttatgatatccatactcactgaagacaaaaagccaccttttctgcgtcttggtggcatgcatgtgtctcatcatcctttcaaacttgtggtggaacagggttttcttccctgtctgtgtattttgagccagcacagttaccaaaattgaacttgtctttcgcttgtgagcggttgtggtcattgtgagggcgggtcatgaggaggctgtagccaaggacgaggtgtgtgcggctgttgcctggacgtttgtccaatccacgttgacatttgagggatcacagcgtgtgaaaatgaactcagaggagaattggtgaattcctatccagtgggcatcttcaaaccctggtcgacggcggaagaatatcaggtcctgagatcacccacccggcgcggcaacagtgcagagtggccacatctggtggaagaagaaaaaaatgtagttattgaattcaatcaagtgtttgcatctttcaagctatcaacaaaattccatcaagaaaggttccagttggtctcacagacgtatggatatccgaggagccacctaaagatggagaaatcaaggcatagagagattaagtgactttgccacagtcacaagctggagaggaccaggagtagagcttagagcgagcccctgactctgggcctgcgtcctgccaggagtcacgctgcctccgttcctaggagagaagacttcctgtaagatggaggtggacaccgaggagaagcggcatcgcacgcggtccaaaggggttcgagttcccgtggaaccagccatacaagagctgttcagctgtcccacccctggctgtgacggcagtggtcatgtcagtggcaaatatgcaagacacagaagtgtatatggttgtcccttggcgaaaaaaagaaaaacacaagataaacagccccaggaacctgctcctaaacgaaagccatttgccgtgaaagcagacagctcctcagtggatgagtgtgacgacagtgatgggactgaggacatggatgagaaggaggaggatgaggaggaggaggaggaagaggaagaagaaaacgaagaccatcaaatgaattgtcacaatactcgaataatgcaagacacagaaaaggatgataacaataatgacgaatatgacaattacgatgaactggtggccaagtcattgttaaacctcggcaaaatcgctgaggatgcagcctaccgggccaggactgagtcagaaatgaacagcaatacctccaatagtctggaagacgatagtgacaaaaacgaaaacctgggtcggaaaagtgagttgagtttagacttagacagtgatgttgttagagaaacagtggactcccttaaactattagcccaaggacacggtgttgtgctctcagaaaacatgaatgacagaaattatgcagacagcatgtcgcagcaagacagtagaaatatgaattacgtcatgttggggaagcccatgaacaacggactcatggaaaagatggtggaggagagcgatgaggaggtgtgtctgagcagtctggagtgtttgaggaatcagtgcttcgacctggccaggaagctcagtgagaccaacccgcaggagaggaatccgcagcagaacatgaacatccgtcagcatgtccggccagaagaggacttccccggaaggacgccggacagaaactactcggacatgctgaacctcatgcggctggaggagcagttgagcccccggtcgagagtgtttgccagctgtgcgaaggaggatgggtgtcatgagcgggacgacgataccacctctgtgaactcggacaggtctgaagaggtgttcgacatgaccaaggggaacctgaccctgctggagaaagccatcgctttggaaacggaaagagcaaaggccatgagggagaagatggccatggaagctgggaggagggacaatatgaggtcatatgaggaccagtctccgagacaacttcccggggaggacagaaagcctaaatccagtgacagccatgtcaaaaagccatactatgatccctcaagaacagaaaagaaagagagcaagtgtccaacccccgggtgtgatggaaccggccacgtaactgggctgtacccacatcaccgcagcctgtccggatgcccgcacaaagatagggtccctccagaaatccttgccatgcatgaaagtgtcctcaagtgccccactccgggctgcacggggcgcgggcatgtcaacagcaacaggaactcccaccgaagcctctccggatgcccgatcgctgcagcagagaaactggccaaggcacaggaaaagcaccagagctgcgacgtgtccaagtccagccaggcctcggaccgcgtgctcaggccaatgtgctttgtgaagcagctggagattcctcagtatggctacagaaacaatgtccccacaactacgccgcgttccaacctggccaaggagctcgagaaatattccaagacctcgtttgaatacaacagttacgacaaccatacttatggcaagcgagccatagctcccaaggtgcaaaccagggatatatcccccaaaggatatgatgatgcgaagcggtactgcaaggaccccagccccagcagcagcagcaccagcagctacgcgcccagcagcagcagcaacctgagctgcggcgggggcagcagcgccagcagcacgtgcagcaagagcagcttcgactacacgcacgacatggaggcggcccacatggcggccaccgccatcctcaacctgtccacgcgctgccgcgagatgccgcagaacctgagcaccaagccgcaggacctgtgcgccacgcggaaccctgacatggaggtggatgagaacgggaccctggacctcagcatgaacaagcagaggccgcgggacagctgctgccccatcctgacccctctggagcccatgtccccccagcagcaggcagtgatgaacaaccggtgtttccagctgggcgagggcgactgctgggacttgcccgtagactacaccaaaatgaaaccccggaggatagacgaggacgagtccaaagacattactccagaagacttggacccattccaggaggctctagaagaaagacggtatcccggggaggtgaccatcccaagtcccaaacccaagtaccctcagtgcaaggagagcaaaaaggacttaataactctgtctggctgccccctggcggacaaaagcattcgaagtatgctggccaccagctcccaagaactcaagtgccccacgcctggctgtgatggttctggacatatcaccggcaattatgcttctcatcggagcctttcaggttgcccaagagcaaagaaaagtggtatcaggatagcacagagcaaagaagataaagaagatcaagaacccatcaggtgtccggtccccgggtgcgacggccagggccacatcactgggaagtacgcgtcccatcgcagcgcctccgggtgccccttggcggccaagaggcagaaagacgggtacctgaatggctcccagttctcctggaagtcggtcaagacggaaggcatgtcctgccccacgccaggatgcgacggctcaggccacgtcagcggcagcttcctcacacaccgcagcttgtcaggatgcccgagagccacgtcagcgatgaagaaggcaaagctttctggagagcagatgctgaccatcaaacagcgggccagcaacggtatagaaaatgatgaagaaatcaaacagttagatgaagaaatcaaggagctaaatgaatccaattcccagatggaagccgatatgattaaactcagaactcagattaccacgatggagagcaacctgaagaccatcgaagaggagaacaaagtgattgagcagcagaacgagtctctcctccacgagctggcgaacctgagccagtctctgatccacagcctggctaacatccagctgccgcacatggatccaatcaatgaacaaaattttgatgcttacgtgactactttgacggaaatgtatacaaatcaagatcgttatcagagtccagaaaataaagccctactggaaaatataaagcaggctgtgagaggaattcaggtctgaacagctgctgtagtgatgaaactcttgcttaaaaaggatgcctcttgttttttgctgctgtaacttaccagaaagtgttctatatttatttctgtttgaatttgaaacagtgttatgcttacaagacttcataatgattttatgtcttgctttaaagatagtacctgcagaatagtttttgaatacacccacattttgtacgtttccatgtaagctgacatagtgttctgccatgtaatgtttatagctgctgatgtatgcacatttgggggtatatctatttctgaagaggtaagctgatcaaaataaatagagtgtaaattctttttaatgctttagtgattaaatgttttagtattttgaactgaaatggacacacaaacacacacacgcacacacagacccacagctttgaatgatcatgttgtggctgagcagccgctttttagacgttatcattttgcctcatgttggaggactttatggaatttaagaaatacattttgtgtgcatattgtttcatagcaagaattcgttgcaaaaatgctttatttttgaacaatgcttggaaatattatgtgacttttttgtttgtttgttttaggaggatggtgtatggtgggggcaataaatgaggttttttgcattccaaggaaatggcatatggattaactgtaagaaatgaaataagtaatttattgtaagacaacatcaagccatggaaacttggcagaagattcaaagcagcttaaacagcacttttaaattaactcctaagcgttacatggttgtgactatggaaactccagttaagacaggatcttatcagaggtggacaacgtgaagatttccttttccattttcaataaactttggaacaaccttctcgtatctcccctagagtttcgtgcccctctgaactgtctgttattgcaatgtagtttatcaacagaatttgtgtgttttcgatttaagctaaaagataatttaagaacatttatttccccttttcactttaaaaaattatgattattcctattattgttatgaaccttcttattttacatttgagggataaaggcaaatgatttgtgagtcttctagttactggaccgagttttctgctggatctggtgggaaggcagctcggtaaagtttccctcctgctccccccgcccgactttgactctgaatcagcatttggtcctattcagaggactcttaccacgacgtttctgttctacacttgggtggagaccagttgaccatagagcatttgcagagcctcattgtttgatttcttgtgactattctaagaatgaatgcaatcagattttaaaagtaactaaatatacttcagcacttttttgctttaaactagatcatcttagacttgtttataccttccagatttgattgttttactcccaatgactgcactatatgtatgcataagaccacttttgagcgctgtgttcccccttctgagtagtcctttgacgacgtgttgtgttttctgatgttgacttgagttccatttagtagcatctcttccttccatgtcttgatgttatgcaggaagtacagacgtactttaaatttttgttatgaaataaaaaaaagatgggttttgtaaaaataaaaaaaaaatatttttagcagaacaggacttacagggtcattgtccccacaatgtgccagtcgactatttgcacttaccttgtcctatatatccgtacggaggtgtgcaattcctcgtgtcagtagccttgtgacactgaacctggatggattatagaggagccctcacggctgatcaataatgttgcaaagggagactacagggatctcacgacgaatattctgatacaatactcaacctcggtatatatatatgtgtataaatatatgtatatcccagcggcactttatactgttcactgtacaaaagcttacagttttccacaaggactttaataactagctgggaaaagacgatgtaattatttcggggctctgcggaaccttctctgtacagcgccccctttctgttgtgctattggttgcagctgccatgctcagaatgcgttttgagagctgaagcaaggtgcttgcagtcacctgaggccgtccgtgtggcccagggccccagctgcctttagggcccccattgttcataacagcatatgcatttccccaccgcgttgtgtctgcagcttctttgccaatatagtaatgcttttagtagagtactagatagtatcagttttggattcttattgttatcacctatgtacaatggaaagggattttaagcacaaacctgctgctcatctaacgttggtacataatctcaaatcaaaagttatctgtgactattatatagggatcacaaaagtgtcacatattagaatgctgacctttcatatggattattgtgagtcatcagagtttattataacttattgttcatattcatttctaagttaatttaagtaatcatttattaagacagaattttgtataaactatttattgtgctctctgtggaactgaagtttgatttatttttgtactacacggcatgggtttgttgacactttaattttgctataaatgtgtggaatcacaagttgctgtgatacttcatttttaaattgtgaactttgtacaaattttgtcatgctggatgttaacacatcttactctaaataaacaaggtgttgccacatttgtagcacgaagg

SEQ ID NO: 213 - DNA, 7063 bp, Homo sapiens
ggtgggtgcattttaattttttcattccctggactatgggttatgatatccatactcactgaagacaaaaagccaccttttctgcgtcttggtggcatgcatgtgtctcatcatcctttcaaacttgtggtggaacagggttttcttccctgtctgtgtattttgagccagcacagttaccaaaattgaacttgtctttcgcttgtgagcggttgtggtcattgtgagggcgggtcatgaggaggctgtagccaaggacgaggtgtgtgcggctgttgcctggacgtttgtccaatccacgttgacatttgagggatcacagcgtgtgaaaatgaactcagaggagaattggtgaattcctatccagtgggcatcttcaaaccctggtcgacggcggaagaatatcaggtcctgagatcacccacccggcgcggcaacagtgcagagtggccacatctggtggaagaagaaaaaaatgtagttattgaattcaatcaagtgtttgcatctttcaagctatcaacaaaattccatcaagaaaggttccagttggtctcacagacgtatggatatccgaggagccacctaaagatggagaaatcaaggcatagagagattaagtgactttgccacagtcacaagctggagaggaccaggagtagagcttagagcgagcccctgactctgggcctgcgtcctgccaggagtcacgctgcctccgttcctaggagagaagacttcctgtaagatggaggtggacaccgaggagaagcggcatcgcacgcggtccaaaggggttcgagttcccgtggaaccagccatacaagagctgttcagctgtcccacccctggctgtgacggcagtggtcatgtcagtggcaaatatgcaagacacagaagtgtatatggttgtcccttggcgaaaaaaagaaaaacacaagataaacagccccaggaacctgctcctaaacgaaagccatttgccgtgaaagcagacagctcctcagtggatgagtgtgacgacagtgatgggactgaggacatggatgagaaggaggaggatgagggggaggagtactccgaggacaatgatgagccaggggatgaggacgaggaggacgaggagggggaccgggaggaggaggaggagatcgaggaggaggatgaggacgatgacgaggatggagaagatgtggaggatgaagaagaggaagaggaggaggaggaggaggaggaagaggaagaagaaaacgaagaccatcaaatgaattgtcacaatactcgaataatgcaagacacagaaaaggatgataacaataatgacgaatatgacaattacgatgaactggtggccaagtcattgttaaacctcggcaaaatcgctgaggatgcagcctaccgggccaggactgagtcagaaatgaacagcaatacctccaatagtctggaagacgatagtgacaaaaacgaaaacctgggtcggaaaagtgagttgagtttagacttagacagtgatgttgttagagaaacagtggactcccttaaactattagcccaaggacacggtgttgtgctctcagaaaacatgaatgacagaaattatgcagacagcatgtcgcagcaagacagtagaaatatgaattacgtcatgttggggaagcccatgaacaacggactcatggaaaagatggtggaggagagcgatgaggaggtgtgtctgagcagtctggagtgtttgaggaatcagtgcttcgacctggccaggaagctcagtgagaccaacccgcaggagaggaatccgcagcagaacatgaacatccgtcagcatgtccggccagaagaggacttccccggaaggacgccggacagaaactactcggacatgctgaacctcatgcggctggaggagcagttgagcccccggtcgagagtgtttgccagctgtgcgaaggaggatgggtgtcatgagcgggacgacgataccacctctgtgaactcggacaggtctgaagaggtgttcgacatgaccaaggggaacctgaccctgctggagaaagccatcgctttggaaacggaaagagcaaaggccatgagggagaagatggccatggaagctgggaggagggacaatatgaggtcatatgaggaccagtctccgagacaacttcccggggaggacagaaagcctaaatccagtgacagccatgtcaaaaagccatactatggtaaagatccctcaagaacagaaaagaaagagagcaagtgtccaacccccgggtgtgatggaaccggccacgtaactgggctgtacccacatcaccgcagcctgtccggatgcccgcacaaagatagggtccctccagaaatccttgccatgcatgaaagtgtcctcaagtgccccactccgggctgcacggggcgcgggcatgtcaacagcaacaggaactcccaccgaagcctctccggatgcccgatcgctgcagcagagaaactggccaaggcacaggaaaagcaccagagctgcgacgtgtccaagtccagccaggcctcggaccgcgtgctcaggccaatgtgctttgtgaagcagctggagattcctcagtatggctacagaaacaatgtccccacaactacgccgcgttccaacctggccaaggagctcgagaaatattccaagacctcgtttgaatacaacagttacgacaaccatacttatggcaagcgagccatagctcccaaggtgcaaaccagggatatatcccccaaaggatatgatgatgcgaagcggtactgcaaggaccccagccccagcagcagcagcaccagcagctacgcgcccagcagcagcagcaacctgagctgcggcgggggcagcagcgccagcagcacgtgcagcaagagcagcttcgactacacgcacgacatggaggcggcccacatggcggccaccgccatcctcaacctgtccacgcgctgccgcgagatgccgcagaacctgagcaccaagccgcaggacctgtgcgccacgcggaaccctgacatggaggtggatgagaacgggaccctggacctcagcatgaacaagcagaggccgcgggacagctgctgccccatcctgacccctctggagcccatgtccccccagcagcaggcagtgatgaacaaccggtgtttccagctgggcgagggcgactgctgggacttgcccgtagactacaccaaaatgaaaccccggaggatagacgaggacgagtccaaagacattactccagaagacttggacccattccaggaggctctagaagaaagacggtatcccggggaggtgaccatcccaagtcccaaacccaagtaccctcagtgcaaggagagcaaaaaggacttaataactctgtctggctgccccctggcggacaaaagcattcgaagtatgctggccaccagctcccaagaactcaagtgccccacgcctggctgtgatggttctggacatatcaccggcaattatgcttctcatcggagcctttcaggttgcccaagagcaaagaaaagtggtatcaggatagcacagagcaaagaagataaagaagatcaagaacccatcaggtgtccggtccccgggtgcgacggccagggccacatcactgggaagtacgcgtcccatcgcagcgcctccgggtgccccttggcggccaagaggcagaaagacgggtacctgaatggctcccagttctcctggaagtcggtcaagacggaaggcatgtcctgccccacgccaggatgcgacggctcaggccacgtcagcggcagcttcctcacacaccgcagcttgtcaggatgcccgagagccacgtcagcgatgaagaaggcaaagctttctggagagcagatgctgaccatcaaacagcgggccagcaacggtatagaaaatgatgaagaaatcaaacagttagatgaagaaatcaaggagctaaatgaatccaattcccagatggaagccgatatgattaaactcagaactcagattaccacgatggagagcaacctgaagaccatcgaagaggagaacaaagtgattgagcagcagaacgagtctctcctccacgagctggcgaacctgagccagtctctgatccacagcctggctaacatccagctgccgcacatggatccaatcaatgaacaaaattttgatgcttacgtgactactttgacggaaatgtatacaaatcaagatcgttatcagagtccagaaaataaagccctactggaaaatataaagcaggctgtgagaggaattcaggtctgaacagctgctgtagtgatgaaactcttgcttaaaaaggatgcctcttgttttttgctgctgtaacttaccagaaagtgttctatatttatttctgtttgaatttgaaacagtgttatgcttacaagacttcataatgattttatgtcttgctttaaagatagtacctgcagaatagtttttgaatacacccacattttgtacgtttccatgtaagctgacatagtgttctgccatgtaatgtttatagctgctgatgtatgcacatttgggggtatatctatttctgaagaggtaagctgatcaaaataaatagagtgtaaattctttttaatgctttagtgattaaatgttttagtattttgaactgaaatggacacacaaacacacacacgcacacacagacccacagctttgaatgatcatgttgtggctgagcagccgctttttagacgttatcattttgcctcatgttggaggactttatggaatttaagaaatacattttgtgtgcatattgtttcatagcaagaattcgttgcaaaaatgctttatttttgaacaatgcttggaaatattatgtgacttttttgtttgtttgttttaggaggatggtgtatggtgggggcaataaatgaggttttttgcattccaaggaaatggcatatggattaactgtaagaaatgaaataagtaatttattgtaagacaacatcaagccatggaaacttggcagaagattcaaagcagcttaaacagcacttttaaattaactcctaagcgttacatggttgtgactatggaaactccagttaagacaggatcttatcagaggtggacaacgtgaagatttccttttccattttcaataaactttggaacaaccttctcgtatctcccctagagtttcgtgcccctctgaactgtctgttattgcaatgtagtttatcaacagaatttgtgtgttttcgatttaagctaaaagataatttaagaacatttatttccccttttcactttaaaaaattatgattattcctattattgttatgaaccttcttattttacatttgagggataaaggcaaatgatttgtgagtcttctagttactggaccgagttttctgctggatctggtgggaaggcagctcggtaaagtttccctcctgctccccccgcccgactttgactctgaatcagcatttggtcctattcagaggactcttaccacgacgtttctgttctacacttgggtggagaccagttgaccatagagcatttgcagagcctcattgtttgatttcttgtgactattctaagaatgaatgcaatcagattttaaaagtaactaaatatacttcagcacttttttgctttaaactagatcatcttagacttgtttataccttccagatttgattgttttactcccaatgactgcactatatgtatgcataagaccacttttgagcgctgtgttcccccttctgagtagtcctttgacgacgtgttgtgttttctgatgttgacttgagttccatttagtagcatctcttccttccatgtcttgatgttatgcaggaagtacagacgtactttaaatttttgttatgaaataaaaaaaagatgggttttgtaaaaataaaaaaaaaatatttttagcagaacaggacttacagggtcattgtccccacaatgtgccagtcgactatttgcacttaccttgtcctatatatccgtacggaggtgtgcaattcctcgtgtcagtagccttgtgacactgaacctggatggattatagaggagccctcacggctgatcaataatgttgcaaagggagactacagggatctcacgacgaatattctgatacaatactcaacctcggtatatatatatgtgtataaatatatgtatatcccagcggcactttatactgttcactgtacaaaagcttacagttttccacaaggactttaataactagctgggaaaagacgatgtaattatttcggggctctgcggaaccttctctgtacagcgccccctttctgttgtgctattggttgcagctgccatgctcagaatgcgttttgagagctgaagcaaggtgcttgcagtcacctgaggccgtccgtgtggcccagggccccagctgcctttagggcccccattgttcataacagcatatgcatttccccaccgcgttgtgtctgcagcttctttgccaatatagtaatgcttttagtagagtactagatagtatcagttttggattcttattgttatcacctatgtacaatggaaagggattttaagcacaaacctgctgctcatctaacgttggtacataatctcaaatcaaaagttatctgtgactattatatagggatcacaaaagtgtcacatattagaatgctgacctttcatatggattattgtgagtcatcagagtttattataacttattgttcatattcatttctaagttaatttaagtaatcatttattaagacagaattttgtataaactatttattgtgctctctgtggaactgaagtttgatttatttttgtactacacggcatgggtttgttgacactttaattttgctataaatgtgtggaatcacaagttgctgtgatacttcatttttaaattgtgaactttgtacaaattttgtcatgctggatgttaacacatcttactctaaataaacaaggtgttgccacatttgtagcacgaaggatctctaa

SEQ ID NO: 214 - DNA, 3642 bp, Homo sapiens
aagcgcctggaagcggaagctggacagacgaggagaggccttgggtgtgacatcaacggaacctgagggaagcaaaactcagcaaggacgcacccggtctgctggactggggctttggcctttcaggttgcccaagagcaaagaaaagtggtatcaggatagcacagagcaaagaagataaagaagatcaagaacccatcaggtgtccggtccccgggtgcgacggccagggccacatcactgggaagtacgcgtcccatcgcagcgcctccgggtgccccttggcggccaagaggcagaaagacgggtacctgaatggctcccagttctcctggaagtcggtcaagacggaaggcatgtcctgccccacgccaggatgcgacggctcaggccacgtcagcggcagcttcctcacacaccgcagcttgtcaggatgcccgagagccacgtcagcgatgaagaaggcaaagctttctggagagcagatgctgaccatcaaacagcgggccagcaacggtatagaaaatgatgaagaaatcaaacagttagatgaagaaatcaaggagctaaatgaatccaattcccagatggaagccgatatgattaaactcagaactcaggtaacaattaccacgatggagagcaacctgaagaccatcgaagaggagaacaaagtgattgagcagcagaacgagtctctcctccacgagctggcgaacctgagccagtctctgatccacagcctggctaacatccagctgccgcacatggatccaatcaatgaacaaaattttgatgcttacgtgactactttgacggaaatgtatacaaatcaagatcgttatcagagtccagaaaataaagccctactggaaaatataaagcaggctgtgagaggaattcaggtctgaacagctgctgtagtgatgaaactcttgcttaaaaaggatgcctcttgttttttgctgctgtaacttaccagaaagtgttctatatttatttctgtttgaatttgaaacagtgttatgcttacaagacttcataatgattttatgtcttgctttaaagatagtacctgcagaatagtttttgaatacacccacattttgtacgtttccatgtaagctgacatagtgttctgccatgtaatgtttatagctgctgatgtatgcacatttgggggtatatctatttctgaagaggtaagctgatcaaaataaatagagtgtaaattctttttaatgctttagtgattaaatgttttagtattttgaactgaaatggacacacaaacacacacacgcacacacagacccacagctttgaatgatcatgttgtggctgagcagccgctttttagacgttatcattttgcctcatgttggaggactttatggaatttaagaaatacattttgtgtgcatattgtttcatagcaagaattcgttgcaaaaatgctttatttttgaacaatgcttggaaatattatgtgacttttttgtttgtttgttttaggaggatggtgtatggtgggggcaataaatgaggttttttgcattccaaggaaatggcatatggattaactgtaagaaatgaaataagtaatttattgtaagacaacatcaagccatggaaacttggcagaagattcaaagcagcttaaacagcacttttaaattaactcctaagcgttacatggttgtgactatggaaactccagttaagacaggatcttatcagaggtggacaacgtgaagatttccttttccattttcaataaactttggaacaaccttctcgtatctcccctagagtttcgtgcccctctgaactgtctgttattgcaatgtagtttatcaacagaatttgtgtgttttcgatttaagctaaaagataatttaagaacatttatttccccttttcactttaaaaaattatgattattcctattattgttatgaaccttcttattttacatttgagggataaaggcaaatgatttgtgagtcttctagttactggaccgagttttctgctggatctggtgggaaggcagctcggtaaagtttccctcctgctccccccgcccgactttgactctgaatcagcatttggtcctattcagaggactcttaccacgacgtttctgttctacacttgggtggagaccagttgaccatagagcatttgcagagcctcattgtttgatttcttgtgactattctaagaatgaatgcaatcagattttaaaagtaactaaatatacttcagcacttttttgctttaaactagatcatcttagacttgtttataccttccagatttgattgttttactcccaatgactgcactatatgtatgcataagaccacttttgagcgctgtgttcccccttctgagtagtcctttgacgacgtgttgtgttttctgatgttgacttgagttccatttagtagcatctcttccttccatgtcttgatgttatgcaggaagtacagacgtactttaaatttttgttatgaaataaaaaaaagatgggttttgtaaaaataaaaaaaaaatatttttagcagaacaggacttacagggtcattgtccccacaatgtgccagtcgactatttgcacttaccttgtcctatatatccgtacggaggtgtgcaattcctcgtgtcagtagccttgtgacactgaacctggatggattatagaggagccctcacggctgatcaataatgttgcaaagggagactacagggatctcacgacgaatattctgatacaatactcaacctcggtatatatatatgtgtataaatatatgtatatcccagcggcactttatactgttcactgtacaaaagcttacagttttccacaaggactttaataactagctgggaaaagacgatgtaattatttcggggctctgcggaaccttctctgtacagcgccccctttctgttgtgctattggttgcagctgccatgctcagaatgcgttttgagagctgaagcaaggtgcttgcagtcacctgaggccgtccgtgtggcccagggccccagctgcctttagggcccccattgttcataacagcatatgcatttccccaccgcgttgtgtctgcagcttctttgccaatatagtaatgcttttagtagagtactagatagtatcagttttggattcttattgttatcacctatgtacaatggaaagggattttaagcacaaacctgctgctcatctaacgttggtacataatctcaaatcaaaagttatctgtgactattatatagggatcacaaaagtgtcacatattagaatgctgacctttcatatggattattgtgagtcatcagagtttattataacttattgttcatattcatttctaagttaatttaagtaatcatttattaagacagaattttgtataaactatttattgtgctctctgtggaactgaagtttgatttatttttgtactacacggcatgggtttgttgacactttaattttgctataaatgtgtggaatcacaagttgctgtgatacttcatttttaaattgtgaactttgtacaaattttgtcatgctggatgttaacacatcttactctaaataaacaaggtgttgccaca

SEQ ID NO: 215 - DNA, 1801 bp, Homo sapiens
gctaggggtgaggaagccctggggcgctgccgccgctttccttaaccacaaatcaggccggacaggagagggaggggtgggggacagtgggtgggcattcagactgccagcactttgctatctacagccggggctcccgagcggcagaaagttccggccactctctgccgcttgggttgggcgaagccaggaccgtgccgcgccaccgccaggatatggagctactgtcgccaccgctccgcgacgtagacctgacggcccccgacggctctctctgctcctttgccacaacggacgacttctatgacgacccgtgtttcgactccccggacctgcgcttcttcgaagacctggacccgcgcctgatgcacgtgggcgcgctcctgaaacccgaagagcactcgcacttccccgcggcggtgcacccggccccgggcgcacgtgaggacgagcatgtgcgcgcgcccagcgggcaccaccaggcgggccgctgcctactgtgggcctgcaaggcgtgcaagcgcaagaccaccaacgccgaccgccgcaaggccgccaccatgcgcgagcggcgccgcctgagcaaagtaaatgaggcctttgagacactcaagcgctgcacgtcgagcaatccaaaccagcggttgcccaaggtggagatcctgcgcaacgccatccgctatatcgagggcctgcaggctctgctgcgcgaccaggacgccgcgccccctggcgccgcagccgccttctatgcgccgggcccgctgcccccgggccgcggcggcgagcactacagcggcgactccgacgcgtccagcccgcgctccaactgctccgacggcatgatggactacagcggccccccgagcggcgcccggcggcggaactgctacgaaggcgcctactacaacgaggcgcccagcgaacccaggcccgggaagagtgcggcggtgtcgagcctagactgcctgtccagcatcgtggagcgcatctccaccgagagccctgcggcgcccgccctcctgctggcggacgtgccttctgagtcgcctccgcgcaggcaagaggctgccgcccccagcgagggagagagcagcggcgaccccacccagtcaccggacgccgccccgcagtgccctgcgggtgcgaaccccaacccgatataccaggtgctctgaggggatggtggccgcccacccgcccgagggatggtgcccctagggtccctcgcgcccaaaagattgaacttaaatgcccccctcccaacagcgctttaaaagcgacctctcttgaggtaggagaggcgggagaactgaagtttccgcccccgccccacagggcaaggacacagcgcggttttttccacgcagcacccttctcggagacccattgcgatggccgctccgtgttcctcggtgggccagagctgaaccttgaggggctaggttcagctttctcgcgccctcccccatgggggtgagaccctcgcagacctaagccctgccccgggatgcaccggttatttgggggggcgtgagacccagtgcactccggtcccaaatgtagcaggtgtaaccgtaacccacccccaacccgtttcccggttcaggaccactttttgtaatacttttgtaatctattcctgtaaataagagttgctttgccagagcaggagcccctggggctgtatttatctctgaggcatggtgtgtggtgctacagggaatttgtacgtttataccgcaggcgggcgagccgcgggcgctcgctcaggtgatcaaaataaaggcgctaatttata

SEQ ID NO: 216 - DNA, 2631 bp, Homo sapiens
tataaaagctgggccggcgcgggccgggccattcgcgacccggaggtgcgcgggcgcgggcgagcagggtctccgggtgggcggcggcgacgccccgcgcaggctggaggccgccgaggctcgccatgccgggagaactctaactcccccatggagtcggccgacttctacgaggcggagccgcggcccccgatgagcagccacctgcagagccccccgcacgcgcccagcagcgccgccttcggctttccccggggcgcgggccccgcgcagcctcccgccccacctgccgccccggagccgctgggcggcatctgcgagcacgagacgtccatcgacatcagcgcctacatcgacccggccgccttcaacgacgagttcctggccgacctgttccagcacagccggcagcaggagaaggccaaggcggccgtgggccccacgggcggcggcggcggcggcgactttgactacccgggcgcgcccgcgggccccggcggcgccgtcatgcccgggggagcgcacgggcccccgcccggctacggctgcgcggccgccggctacctggacggcaggctggagcccctgtacgagcgcgtcggggcgccggcgctgcggccgctggtgatcaagcaggagccccgcgaggaggatgaagccaagcagctggcgctggccggcctcttcccttaccagccgccgccgccgccgccgccctcgcacccgcacccgcacccgccgcccgcgcacctggccgccccgcacctgcagttccagatcgcgcactgcggccagaccaccatgcacctgcagcccggtcaccccacgccgccgcccacgcccgtgcccagcccgcaccccgcgcccgcgctcggtgccgccggcctgccgggccctggcagcgcgctcaaggggctgggcgccgcgcaccccgacctccgcgcgagtggcggcagcggcgcgggcaaggccaagaagtcggtggacaagaacagcaacgagtaccgggtgcggcgcgagcgcaacaacatcgcggtgcgcaagagccgcgacaaggccaagcagcgcaacgtggagacgcagcagaaggtgctggagctgaccagtgacaatgaccgcctgcgcaagcgggtggaacagctgagccgcgaactggacacgctgcggggcatcttccgccagctgccagagagctccttggtcaaggccatgggcaactgcgcgtgaggcgcgcggctgtgggaccgccctgggccagcctccggcggggacccagggagtggtttggggtcgccggatctcgaggcttgcccgagccgtgcgagccaggactaggagattccggtgcctcctgaaagcctggcctgctccgcgtgtcccctcccttcctctgcgccggacttggtgcgtctaagatgagggggccaggcggtggcttctccctgcgaggaggggagaattcttggggctgagctgggagcccggcaactctagtatttaggataaccttgtgccttggaaatgcaaactcaccgctccaatgcctactgagtagggggagcaaatcgtgccttgtcattttatttggaggtttcctgcctccttcccgaggctacagcagacccccatgagagaaggaggggagcaggcccgtggcaggaggagggctcagggagctgagatcccgacaagcccgccagccccagccgctcctccacgcctgtccttagaaaggggtggaaacatagggacttggggcttggaacctaaggttgttcccctagttctacatgaaggtggagggtctctagttccacgcctctcccacctccctccgcacacaccccaccccagcctgctataggctgggcttccccttggggcggaactcactgcgatgggggtcaccaggtgaccagtgggagcccccaccccgagtcacaccagaaagctaggtcgtgggtcagctctgaggatgtatacccctggtgggagagggagacctagagatctggctgtggggcgggcatggggggtgaagggccactgggaccctcagccttgtttgtactgtatgccttcagcattgcctaggaacacgaagcacgatcagtccatcccagagggaccggagttatgacaagctttccaaatattttgctttatcagccgatatcaacacttgtatctggcctctgtgccccagcagtgccttgtgcaatgtgaatgtgcgcgtctctgctaaaccaccattttatttggtttttgttttgttttggttttgctcggatacttgccaaaatgagactctccgtcggcagctgggggaagggtctgagactccctttccttttggttttgggattacttttgatcctgggggaccaatgaggtgaggggggttctcctttgccctcagctttccccagcccctccggcctgggctgcccacaaggcttgtcccccagaggccctggctcctggtcgggaagggaggtggcctcccgccaacgcatcactggggctgggagcagggaaggacggcttggttctcttcttttggggagaacgtagagtctcactctagatgttttatgtattatatctataatataaacatatcaaagtcaa

SEQ ID NO: 217 - DNA, 1403 bp, Homo sapiens
gactatctcccagcggcaggcccttcgataaaatcaggaacttgtgctggccctgcaatgtcaagggagggggctcacccagggctcctgtagctcagggggcaggcctgagccctgcacccgccccacgaccgtccagcccctgacggggcaccccatcctgaggggctctgcattggcccccaccgaggcaggggatctgaccgactcggagcccggctggatgttacaggcgtgcaaaatggaagggtttcccctcgtcccccctccatcagaagacctggtgccctatgacacggatctataccaacgccaaacgcacgagtattacccctatctcagcagtgatggggagagccatagcgaccattactgggacttccacccccaccacgtgcacagcgagttcgagagcttcgccgagaacaacttcacggagctccagagcgtgcagcccccgcagctgcagcagctctaccgccacatggagctggagcagatgcacgtcctcgatacccccatggtgccaccccatcccagtcttggccaccaggtctcctacctgccccggatgtgcctccagtacccatccctgtccccagcccagcccagctcagatgaggaggagggcgagcggcagagccccccactggaggtgtctgacggcgaggcggatggcctggagcccgggcctgggctcctgcctggggagacaggcagcaagaagaagatccgcctgtaccagttcctgttggacctgctccgcagcggcgacatgaaggacagcatctggtgggtggacaaggacaagggcaccttccagttctcgtccaagcacaaggaggcgctggcgcaccgctggggcatccagaagggcaaccgcaagaagatgacctaccagaagatggcgcgcgcgctgcgcaactacggcaagacgggcgaggtcaagaaggtgaagaagaagctcacctaccagttcagcggcgaagtgctgggccgcgggggcctggccgagcggcgccacccgccccactgagcccgcagcccccgccgggccccgccaggcctccccgctggccatagcattaagccctcgcccggcccggacacagggaggacgctcccggggcccagaggcaggactgtggcgggccgggcctcgcctcacccgccccctccccccactccaggccccctccacatcccgcttcgcctccctccaggactccaccccggctcccggacgccagctgggcgtcagaccccaccggggcaaccttgcagaggacgacccggggtactgccttgggagtctcaagtccgtatgtaaatcagatctcccctctcacccctcccacccattaacctcctcccaaaaaacaagtaaagttattctcaatcca

SEQ ID NO: 218 - DNA, 1168 bp, Homo sapiens
ccgaggcaggggatctgaccgactcggagcccggctggatgttacaggcgtgcaaaatggaagggtttcccctcgtcccccctcagccatcagaagacctggtgccctatgacacggatctataccaacgccaaacgcacgagtattacccctatctcagcagtgatggggagagccatagcgaccattactgggacttccacccccaccacgtgcacagcgagttcgagagcttcgccgagaacaacttcacggagctccagagcgtgcagcccccgcagctgcagcagctctaccgccacatggagctggagcagatgcacgtcctcgatacccccatggtgccaccccatcccagtcttggccaccaggtctcctacctgccccggatgtgcctccagtacccatccctgtccccagcccagcccagctcagatgaggaggagggcgagcggcagagccccccactggaggtgtctgacggcgaggcggatggcctggagcccgggcctgggctcctgcctggggagacaggcagcaagaagaagatccgcctgtaccagttcctgttggacctgctccgcagcggcgacatgaaggacagcatctggtgggtggacaaggacaagggcaccttccagttctcgtccaagcacaaggaggcgctggcgcaccgctggggcatccagaagggcaaccgcaagaagatgacctaccagaagatggcgcgcgcgctgcgcaactacggcaagacgggcgaggtcaagaaggtgaagaagaagctcacctaccagttcagcggcgaagtgctgggccgcgggggcctggccgagcggcgccacccgccccactgagcccgcagcccccgccgggccccgccaggcctccccgctggccatagcattaagccctcgcccggcccggacacagggaggacgctcccggggcccagaggcaggactgtggcgggccgggcctcgcctcacccgccccctccccccactccaggccccctccacatcccgcttcgcctccctccaggactccaccccggctcccggacgccagctgggcgtcagaccccaccggggcaaccttgcagaggacgacccggggtactgccttgggagtctcaagtccgtatgtaaatcagatctcccctctcacc

SEQ ID NO: 219 - DNA, 8087 bp, Homo sapiens
ttctgcgcatactctgcaaaaatttactataaagtcattaaggacattgagccaggtgaggagctgctggtgcacgtgaaggaaggcgtctaccccctgggcacagtgccgcccggcctggacgaggagcccacgttccgctgtgacgagtgtgacgaactcttccagtccaagctggacctgcggcgccataagaagtacacgtgtggctcagtgggggctgcgctctacgagggcctggctgaggagctcaagcccgagggccttggcggtggcagcggccaagcccacgagtgcaaggactgcgagcggatgttccccaacaagtacagcctggagcagcacatggtcatccacacggaggagcgcgagtacaaatgcgaccagtgtcccaaggccttcaactggaagtccaacctcatccgccaccagatgtcccacgacagcggcaaacgcttcgaatgtgaaaactgcgtgaaggtgttcacggaccccagcaaccttcagcggcacatccgctcgcagcacgtgggcgctcgggcccacgcctgccccgactgcgggaagaccttcgccacgtcctccggcctcaagcagcacaagcatatccacagcacggtgaagcctttcatatgtgaggtctgccacaagtcctacacgcagttctccaacctgtgccggcacaagcggatgcacgccgactgccgcacgcagatcaagtgcaaggactgtggccagatgttcagcactacctcctccctcaacaagcaccggcgcttctgcgagggcaagaaccattacacgccgggcggcatctttgccccgggcctgcccttgacccccagccccatgatggacaaggcaaaaccctcccccagcctcaatcacgccagcctgggcttcaacgagtactttccctccaggccgcacccggggagcctgcccttctccacggcgcctcccacgttccccgcactcacccccggcttcccgggcatcttccctccatccttgtacccccggccgcctctgctacctcccacatcgctgctcaagagccccctgaaccacacccaggacgccaagctccccagtcccctggggaacccagccctgcccctggtctccgccgtcagcaacagcagccagggcacgacggcagctgcggggcccgaggagaagttcgagagccgcctggaggactcctgtgtggagaagctgaagaccaggagcagcgacatgtcggacggcagtgactttgaggacgtcaacaccaccacggggaccgacctggacacgaccacggggacgggctcggacctggacagcgacgtggacagcgaccctgacaaggacaagggcaagggcaagtccgccgagggccagcccaagtttgggggcggcttggcgcccccgggggccccgaacagcgtggccgaggtgcctgtcttctattcccagcactcattcttcccgccacccgacgagcagctgctgactgcaacgggcgccgccggggactccatcaaggccatcgcatccattgccgagaagtactttggccccggcttcatggggatgcaggagaagaagctgggctcgctcccctaccactcggcgttccccttccagttcctgcccaacttcccccactccctttaccccttcacggaccgagccctcgcccacaacttgctggtcaaggccgagccaaagtcaccccgggacgccctcaaggtgggcggccccagtgccgagtgcccctttgatctcaccaccaagcccaaagacgtgaagcccatcctgcccatgcccaagggcccctcggcccccgcatccggcgaggagcagccgctggacctgagcatcggcagccgggcccgtgccagccaaaacggcggcgggcgggagccccgcaagaaccacgtctatggggaacgcaagctgggcgccggcgaggggctgccccaggtgtgcccggcgcggatgccccagcagcccccgctccactacgccaagccctcgcccttcttcatggaccccatctacagcagggtagaaaagcggaaggtcacagaccccgtgggagccctgaaggagaagtacctgcggccgtccccgctgctcttccacccccagatgtcagccatagagaccatgacagagaagctggagagctttgcagccatgaaggcggactcgggcagctccctgcagcccctcccccaccaccccttcaacttccggtccccacccccaacgctctccgaccccatcctcaggaagggcaaggagcgatacacgtgcaggtactgtgggaagatcttccccagatcagccaatctcaccagacacctgaggacgcacactggggagcagccgtacaggtgtaagtactgcgaccgctccttcagcatctcttcgaacctccagcggcacgtccggaacatccacaacaaggagaagcctttcaagtgccacctgtgcaaccgctgcttcgggcagcagaccaacctggaccggcacctcaagaagcacgagcacgagaacgcaccagtgagccagcaccccggggtcctcacgaaccacctggggaccagcgcgtcctctcccacctcagagtcggacaaccacgcacttttagacgagaaagaagactcttatttctcggaaatcagaaactttattgccaatagtgagatgaaccaagcatcaacgcgaacagagaaacgggcggacatgcagatcgtggacggcagtgcccagtgtccaggcctagccagtgagaagcaggaggacgtggaggaggaggacgacgatgacctggaggaggacgatgaggacagcctggccgggaagtcgcaggatgacaccgtgtcccccgcacccgagccccaggccgcctacgaggatgaggaggatgaggagccagccgcctccctggccgtgggctttgaccacacccgaaggtgtgctgaggaccacgaaggcggtctgttagctttggagccgatgccgacttttgggaaggggctggacctccgcagagcagctgaggaagcatttgaagttaaagatgtgcttaattccaccttagattctgaggctttaaaacatacactgtgcaggcaggctaagaaccaggcatatgcaatgatgctgtccctttccgaagacactcctctccacaccccctcccagggttctctggacgcttggttgaaggtcactggagccacgtcggagtctggagcatttcaccccatcaaccacctctgacgggctgggcagccgggggccggtggccagagcgagggcaccagccacgaaggacggaggcgggcggggccccggagaaccctgtccctgcgtgtggccactcctcagcatcctccccacccaccatggttcattccgacttttccaatggaaactcagatcccaaaagtccctaaagcagtcgtagagtctcaccatctccaaggattggtcttgagaacactgttcagtgacggccatgcaggtggccgtccaaagacagccaacggagctgcctcgcagaatcagccagtgggcaggtggacgctctgctgagacagaagctggtggccactgccgggtgcccgcgtggggtcgcggaagggaatggatagactggtgtgctcaaaagagagagatcactcaaatgatttttataatgaaatgacaagaataacccttttggtaaccgtattgactgcagagtctatttaagcatgtggttttaaaaatagacagtattttttaaaaatcaaaaaatgacttgcaaattgttttttaaaagtaattttgcattgctttgaaatttgagctcatttgcaaacccgagtctgcctgggaacccgcactgtgcctgggtgtattctttatactgtagataatggagaaattttctatctctgtccctatttgtataagccaaggtgatgctgggtgccccgaggcagaacaagaggcgcggggccacacccgtgaaccatgcagacggccgaagaagtcttaggcagggcgccctgggctgcaggcctgcccgaggctgggatgggaagtgtgcctgccctcgtgtgacatggaattggtgtcaggaccgccacgtggccttcagaggaatccacaggtccccacccaagatccctcaattatatggggaagtcgagggcctgtggcttggatccgccatgcagagatgtggccgggcacccatcttccttccctcctctgtccctgcctcggccaccccacgcgggaacccagcgccgtcctctgaaggcagggccttggccacgtcctgggtctcccacctcccacctgaccccagcggctccggtgtcctccacgtggctgccctggggagcaatcccagcggatcgctccgggccaccaagccgcacctgtgcctgagactccggatggacgacacagtcgtcacgtcgctcttcctgcgggttcttggcgagacacagcttgagaacagaagggcgtcgggggaacctgccgcaaggagcagagacagcacagccccccgggcccagccgcctccctctcttgggacgcaacttcttccccactcggatgggctttaaattattcccataggggccaatttcaaataataatttttttccctgatggaatttaccttaatctgtatataacttgtaattttttctaattcatttcttttcttattttatttcctccttaacagtatttttggcattagacattcttattgtgaagaaataatgttaatataagtatctggtgaaggaccaaaaccgtgtgataaggttgtgtgtcgtgtgggagtggggcgattttttatgtgccaaatacccccgtcccccccatgaatcctgctgtccctgctgccgtttaccagacaatcatatgtttttgttaaatttgcgtttcagttacatttgcatttaagacaagtgttctatttatttcttgtattgtttggaagaaaaaatgatgatagagtcccaaaaagaagagaaaaaaaatgcccaagttgccctttaaaaaaaaagagcgtaaatacaaacaggagtggtgcaagccgccttggtgtgggtttgtgtcacgtgtggacatctcctcaggctttgtgtcacgcgtggacatctcctcaggctgtccccagcggtgacgggaggtgtcctggctgctccaggacaaaagacaatcgtctctgtgggtgccgggtggtccaggcttgcactgaagacgtgccacggggaggctcctgcaggaggctcaacccgacggatcacagtgaaagggattcctcccacgccagatctgcacaacgaggcaagacaggacccacctgtgcgtgcgctggggccatggggtggccccgccggggcagcgggggagctgcctgcagaagagccagctggcgtgtcgggaaggatccaggatctgcaaacacaactgctcaggccttctcacgcgtttccacaacatcccctgggtcagacccaccaggtaccccgtaggaatttccagtttcccttgatctagatgggattcttataaaaattcaacctcagacataaacaccccatttctgtaaacccaaattatatggtttcttctgcgaaagagtaaggtgtgtgcttttttttttttgcaatatgaccccgtctctctgaagtgggacattcggacggatggagccctcagcgtgtcttttcagcaggagcagaaccgatgagagccgcccttaccgttggtctccggatcccccagtcccatcccgccgttttcggctgtcttcctaaccgtcctgtcttctcttggcgctctttccttccacctttcccaagagtcctggttgcacgttttaagtcatatattttcgtccccctgaaaatgatggcaagcccagtttctcctgagcattcagacccccaggccccagcacttggcgttttcaggaggccctgttcttagagcccctgacaaaggcagcacttatttcctgggctggtgcgccccaaaacacggccccgacacttagtgtggccccaggccccagcgagcctcgccctcccagttttgctctgcccagcagtgttggtgcccagagatgacaagggccagggagcctggcccgggtgtgagaattcagagattctggcctccagctgtcaccacaccgtaacggggccatgtaactgtgcagcatggacagggatgcgacggggcagctggctgtgtccatggccaggtggccagggtcagggctgcaagccaggggtccagggcccttccgttcagcccaaatgctgccccaatgctaactccttggattgtcaacccccatcccccaaatggaaattccgaaggaggcctcctcgcacctgccctccgctgctcctcagaccccagcccccagcgagccgacgtccccacccgttcctgctctcatccccaggttgggcacgtggggttcctcctctgtgggcctggcagacccttcatgagtgggacccaagatatcactgacttcaacccagaggatcgagcccctgcaccctgcctggggccctggggtgtggagcagtggctggggtgggcgtggtgtggcctgagagactgcccagctggagaggccttcctttacaaggccacgcgtgcagctgtcccatccagaccccgactggccaagacctccacgtccccagagtccagccctggaaattccaagggccctggcgtcctctgccttccccgcttccccatgagcgtctgcaaaacacttgcctgaatacatatcacgtattttagactcgaagcctcaaagcactggattgtggtcccctgccccctctgtcccgtccccctgcccaagtgactgaaacctactgagctatattcactgtgctgtcctagggggagggagagcagagctcgcccctgcactgcagccttgtgggggagggcaaggctctcctcccagccagggacgccaggacatagctgctcctggtcagtggaggtcagccgggtatcaaaagccatgaaactgtgtctctgtagcaatgagtgatactgtgacaaaaccatccttgcattcttcctagaagagttcctctgctccttccattccatttttgtgtttgttttgttcttttctgtcactgatccgtattaccacttttggaaaaaaataaataaataaataaataaaaggcagcttgagtttccaaacgtgtgattcacttgtgaacaaaagtcattctaacaattgccttcagcgtcacgtgcattgccactgcgctttcggcacgagggatgctgagccctggtgtcagagtcgtaatttaaagcgtgtgtgtatatggactttgtcccttaaggtcgatataaagaatcctcgcagaatcacagacctgtgccgcccgccaccttctgccattgttacattacagatttggtttagttttgttttgttttgttttttcttttagaactgtatagtattgaaaaagaaatcaaatgtaaatgtctggttttcatataatgtttaaaaagaccattgagaaggaggctggcgctcgccccatgtcccccttgattgtaaattgcttctgttctgtttataagtaaactgtgcatgactcctgcttagcggtcattatcgtgtctgttggtgaaatttttattaaaaggaaaattctgtagatgcacttattgaatatgtgattaggatctacgtctgagactaggagtcctgaactgctgacgcgaaagaggcgcagttcccaattaatacggaaatcgctgtgggagaagaatgaaataagacgtgaagtgtaggaaatcatgaaaagaacaattttgcaaattgcattctgatgcttgtgatgaacacaaatgtacttgtgtagagacatttccttaagagaaagcctaggagaagccgatttggaggttaatgctgtagaataggactgtataccaaatgtaatctttccaatgctccaatgaatttatacatgagattgatatgcaataaatctgtgtgcttttct

SEQ ID NO: 220 - DNA, 8721 bp, Homo sapiens
ctgacaatgctggggagatgaagatagtgtgtggctgcttctggactcaaggaggaggagagagattccgcgagccgacaccatgcgatccaaggcgagggcgaggaagctagccaaaagtgacggtgacgttgtaaataatatgtatgagcccaaccgggacctgctggccagccacagcgcggaggacgaggccgaggacagtgccatgtcgcccatccccgtggggccaccgtcccccttccccaccagcgaggacttcacccccaaggagggctcgccgtacgaggcccctgtctacattcctgaagacattccgatcccagcagacttcgagctccgagagtcctccatcccaggggctggcctgggggtctgggccaagaggaagatggaagccggggagaggctgggcccctgcgtggtggtgccccgggcggcggcaaaggagacagacttcggatgggagcaaatactgacggacgtggaagtgtcgccccaggaaggctgcatcacaaagatctccgaagacctgggcagtgagaagttctgcgtggatgcaaatcaggcgggggctggcagctggctcaagtacatccgtgtggcgtgctcctgcgatgaccagaacctcaccatgtgtcagatcagtgagcaggtgatttactataaagtcattaaggacattgagccaggtgaggagctgctggtgcacgtgaaggaaggcgtctaccccctgggcacagtgccgcccggcctggacgaggagcccacgttccgctgtgacgagtgtgacgaactcttccagtccaagctggacctgcggcgccataagaagtacacgtgtggctcagtgggggctgcgctctacgagggcctggctgaggagctcaagcccgagggccttggcggtggcagcggccaagcccacgagtgcaaggactgcgagcggatgttccccaacaagtacagcctggagcagcacatggtcatccacacggaggagcgcgagtacaaatgcgaccagtgtcccaaggccttcaactggaagtccaacctcatccgccaccagatgtcccacgacagcggcaaacgcttcgaatgtgaaaactgcgtgaaggtgttcacggaccccagcaaccttcagcggcacatccgctcgcagcacgtgggcgctcgggcccacgcctgccccgactgcgggaagaccttcgccacgtcctccggcctcaagcagcacaagcatatccacagcacggtgaagcctttcatatgtgaggtctgccacaagtcctacacgcagttctccaacctgtgccggcacaagcggatgcacgccgactgccgcacgcagatcaagtgcaaggactgtggccagatgttcagcactacctcctccctcaacaagcaccggcgcttctgcgagggcaagaaccattacacgccgggcggcatctttgccccgggcctgcccttgacccccagccccatgatggacaaggcaaaaccctcccccagcctcaatcacgccagcctgggcttcaacgagtactttccctccaggccgcacccggggagcctgcccttctccacggcgcctcccacgttccccgcactcacccccggcttcccgggcatcttccctccatccttgtacccccggccgcctctgctacctcccacatcgctgctcaagagccccctgaaccacacccaggacgccaagctccccagtcccctggggaacccagccctgcccctggtctccgccgtcagcaacagcagccagggcacgacggcagctgcggggcccgaggagaagttcgagagccgcctggaggactcctgtgtggagaagctgaagaccaggagcagcgacatgtcggacggcagtgactttgaggacgtcaacaccaccacggggaccgacctggacacgaccacggggacgggctcggacctggacagcgacgtggacagcgaccctgacaaggacaagggcaagggcaagtccgccgagggccagcccaagtttgggggcggcttggcgcccccgggggccccgaacagcgtggccgaggtgcctgtcttctattcccagcactcattcttcccgccacccgacgagcagctgctgactgcaacgggcgccgccggggactccatcaaggccatcgcatccattgccgagaagtactttggccccggcttcatggggatgcaggagaagaagctgggctcgctcccctaccactcggcgttccccttccagttcctgcccaacttcccccactccctttaccccttcacggaccgagccctcgcccacaacttgctggtcaaggccgagccaaagtcaccccgggacgccctcaaggtgggcggccccagtgccgagtgcccctttgatctcaccaccaagcccaaagacgtgaagcccatcctgcccatgcccaagggcccctcggcccccgcatccggcgaggagcagccgctggacctgagcatcggcagccgggcccgtgccagccaaaacggcggcgggcgggagccccgcaagaaccacgtctatggggaacgcaagctgggcgccggcgaggggctgccccaggtgtgcccggcgcggatgccccagcagcccccgctccactacgccaagccctcgcccttcttcatggaccccatctacagggtagaaaagcggaaggtcacagaccccgtgggagccctgaaggagaagtacctgcggccgtccccgctgctcttccacccccagatgtcagccatagagaccatgacagagaagctggagagctttgcagccatgaaggcggactcgggcagctccctgcagcccctcccccaccaccccttcaacttccggtccccacccccaacgctctccgaccccatcctcaggaagggcaaggagcgatacacgtgcaggtactgtgggaagatcttccccagatcagccaatctcaccagacacctgaggacgcacactggggagcagccgtacaggtgtaagtactgcgaccgctccttcagcatctcttcgaacctccagcggcacgtccggaacatccacaacaaggagaagcctttcaagtgccacctgtgcaaccgctgcttcgggcagcagaccaacctggaccggcacctcaagaagcacgagcacgagaacgcaccagtgagccagcaccccggggtcctcacgaaccacctggggaccagcgcgtcctctcccacctcagagtcggacaaccacgcacttttagacgagaaagaagactcttatttctcggaaatcagaaactttattgccaatagtgagatgaaccaagcatcaacgcgaacagagaaacgggcggacatgcagatcgtggacggcagtgcccagtgtccaggcctagccagtgagaagcaggaggacgtggaggaggaggacgacgatgacctggaggaggacgatgaggacagcctggccgggaagtcgcaggatgacaccgtgtcccccgcacccgagccccaggccgcctacgaggatgaggaggatgaggagccagccgcctccctggccgtgggctttgaccacacccgaaggtgtgctgaggaccacgaaggcggtctgttagctttggagccgatgccgacttttgggaaggggctggacctccgcagagcagctgaggaagcatttgaagttaaagatgtgcttaattccaccttagattctgaggctttaaaacatacactgtgcaggcaggctaagaaccaggcatatgcaatgatgctgtccctttccgaagacactcctctccacaccccctcccagggttctctggacgcttggttgaaggtcactggagccacgtcggagtctggagcatttcaccccatcaaccacctctgacgggctgggcagccgggggccggtggccagagcgagggcaccagccacgaaggacggaggcgggcggggccccggagaaccctgtccctgcgtgtggccactcctcagcatcctccccacccaccatggttcattccgacttttccaatggaaactcagatcccaaaagtccctaaagcagtcgtagagtctcaccatctccaaggattggtcttgagaacactgttcagtgacggccatgcaggtggccgtccaaagacagccaacggagctgcctcgcagaatcagccagtgggcaggtggacgctctgctgagacagaagctggtggccactgccgggtgcccgcgtggggtcgcggaagggaatggatagactggtgtgctcaaaagagagagatcactcaaatgatttttataatgaaatgacaagaataacccttttggtaaccgtattgactgcagagtctatttaagcatgtggttttaaaaatagacagtattttttaaaaatcaaaaaatgacttgcaaattgttttttaaaagtaattttgcattgctttgaaatttgagctcatttgcaaacccgagtctgcctgggaacccgcactgtgcctgggtgtattctttatactgtagataatggagaaattttctatctctgtccctatttgtataagccaaggtgatgctgggtgccccgaggcagaacaagaggcgcggggccacacccgtgaaccatgcagacggccgaagaagtcttaggcagggcgccctgggctgcaggcctgcccgaggctgggatgggaagtgtgcctgccctcgtgtgacatggaattggtgtcaggaccgccacgtggccttcagaggaatccacaggtccccacccaagatccctcaattatatggggaagtcgagggcctgtggcttggatccgccatgcagagatgtggccgggcacccatcttccttccctcctctgtccctgcctcggccaccccacgcgggaacccagcgccgtcctctgaaggcagggccttggccacgtcctgggtctcccacctcccacctgaccccagcggctccggtgtcctccacgtggctgccctggggagcaatcccagcggatcgctccgggccaccaagccgcacctgtgcctgagactccggatggacgacacagtcgtcacgtcgctcttcctgcgggttcttggcgagacacagcttgagaacagaagggcgtcgggggaacctgccgcaaggagcagagacagcacagccccccgggcccagccgcctccctctcttgggacgcaacttcttccccactcggatgggctttaaattattcccataggggccaatttcaaataataatttttttccctgatggaatttaccttaatctgtatataacttgtaattttttctaattcatttcttttcttattttatttcctccttaacagtatttttggcattagacattcttattgtgaagaaataatgttaatataagtatctggtgaaggaccaaaaccgtgtgataaggttgtgtgtcgtgtgggagtggggcgattttttatgtgccaaatacccccgtcccccccatgaatcctgctgtccctgctgccgtttaccagacaatcatatgtttttgttaaatttgcgtttcagttacatttgcatttaagacaagtgttctatttatttcttgtattgtttggaagaaaaaatgatgatagagtcccaaaaagaagagaaaaaaaatgcccaagttgccctttaaaaaaaaagagcgtaaatacaaacaggagtggtgcaagccgccttggtgtgggtttgtgtcacgtgtggacatctcctcaggctttgtgtcacgcgtggacatctcctcaggctgtccccagcggtgacgggaggtgtcctggctgctccaggacaaaagacaatcgtctctgtgggtgccgggtggtccaggcttgcactgaagacgtgccacggggaggctcctgcaggaggctcaacccgacggatcacagtgaaagggattcctcccacgccagatctgcacaacgaggcaagacaggacccacctgtgcgtgcgctggggccatggggtggccccgccggggcagcgggggagctgcctgcagaagagccagctggcgtgtcgggaaggatccaggatctgcaaacacaactgctcaggccttctcacgcgtttccacaacatcccctgggtcagacccaccaggtaccccgtaggaatttccagtttcccttgatctagatgggattcttataaaaattcaacctcagacataaacaccccatttctgtaaacccaaattatatggtttcttctgcgaaagagtaaggtgtgtgcttttttttttttgcaatatgaccccgtctctctgaagtgggacattcggacggatggagccctcagcgtgtcttttcagcaggagcagaaccgatgagagccgcccttaccgttggtctccggatcccccagtcccatcccgccgttttcggctgtcttcctaaccgtcctgtcttctcttggcgctctttccttccacctttcccaagagtcctggttgcacgttttaagtcatatattttcgtccccctgaaaatgatggcaagcccagtttctcctgagcattcagacccccaggccccagcacttggcgttttcaggaggccctgttcttagagcccctgacaaaggcagcacttatttcctgggctggtgcgccccaaaacacggccccgacacttagtgtggccccaggccccagcgagcctcgccctcccagttttgctctgcccagcagtgttggtgcccagagatgacaagggccagggagcctggcccgggtgtgagaattcagagattctggcctccagctgtcaccacaccgtaacggggccatgtaactgtgcagcatggacagggatgcgacggggcagctggctgtgtccatggccaggtggccagggtcagggctgcaagccaggggtccagggcccttccgttcagcccaaatgctgccccaatgctaactccttggattgtcaacccccatcccccaaatggaaattccgaaggaggcctcctcgcacctgccctccgctgctcctcagaccccagcccccagcgagccgacgtccccacccgttcctgctctcatccccaggttgggcacgtggggttcctcctctgtgggcctggcagacccttcatgagtgggacccaagatatcactgacttcaacccagaggatcgagcccctgcaccctgcctggggccctggggtgtggagcagtggctggggtgggcgtggtgtggcctgagagactgcccagctggagaggccttcctttacaaggccacgcgtgcagctgtcccatccagaccccgactggccaagacctccacgtccccagagtccagccctggaaattccaagggccctggcgtcctctgccttccccgcttccccatgagcgtctgcaaaacacttgcctgaatacatatcacgtattttagactcgaagcctcaaagcactggattgtggtcccctgccccctctgtcccgtccccctgcccaagtgactgaaacctactgagctatattcactgtgctgtcctagggggagggagagcagagctcgcccctgcactgcagccttgtgggggagggcaaggctctcctcccagccagggacgccaggacatagctgctcctggtcagtggaggtcagccgggtatcaaaagccatgaaactgtgtctctgtagcaatgagtgatactgtgacaaaaccatccttgcattcttcctagaagagttcctctgctccttccattccatttttgtgtttgttttgttcttttctgtcactgatccgtattaccacttttggaaaaaaataaataaataaataaataaaaggcagcttgagtttccaaacgtgtgattcacttgtgaacaaaagtcattctaacaattgccttcagcgtcacgtgcattgccactgcgctttcggcacgagggatgctgagccctggtgtcagagtcgtaatttaaagcgtgtgtgtatatggactttgtcccttaaggtcgatataaagaatcctcgcagaatcacagacctgtgccgcccgccaccttctgccattgttacattacagatttggtttagttttgttttgttttgttttttcttttagaactgtatagtattgaaaaagaaatcaaatgtaaatgtctggttttcatataatgtttaaaaagaccattgagaaggaggctggcgctcgccccatgtcccccttgattgtaaattgcttctgttctgtttataagtaaactgtgcatgactcctgcttagcggtcattatcgtgtctgttggtgaaatttttattaaaaggaaaattctgtagatgcacttattgaatatgtgattaggatctacgtctgagactaggagtcctgaactgctgacgcgaaagaggcgcagttcccaattaatacggaaatcgctgtgggagaagaatgaaataagacgtgaagtgtaggaaatcatgaaaagaacaattttgcaaattgcattctgatgcttgtgatgaacacaaatgtacttgtgtagagacatttccttaagagaaagcctaggagaagccgatttggaggttaatgctgtagaataggactgtataccaaatgtaatctttccaatgctccaatgaatttatacatgagattgatatgcaataaatctgtgtgcttttct

SEQ ID NO: 221 - DNA, 3737 bp, Homo sapiens
atttactataaagtcattaaggacattgagccaggtgaggagctgctggtgcacgtgaaggaaggcgtctaccccctgggcacagtgccgcccggcctggacgaggagcccacgttccgctgtgacgagtgtgacgaactcttccagtccaagctggacctgcggcgccataagaagtacacgtgtggctcagtgggggctgcgctctacgagggcctggctgaggagctcaagcccgagggccttggcggtggcagcggccaagcccacgagtgcaaggactgcgagcggatgttccccaacaagtacagcctggagcagcacatggtcatccacacggaggagcgcgagtacaaatgcgaccagtgtcccaaggccttcaactggaagtccaacctcatccgccaccagatgtcccacgacagcggcaaacgcttcgaatgtgaaaactgcgtgaaggtgttcacggaccccagcaaccttcagcggcacatccgctcgcagcacgtgggcgctcgggcccacgcctgccccgactgcgggaagaccttcgccacgtcctccggcctcaagcagcacaagcatatccacagcacggtgaagcctttcatatgtgaggtctgccacaagtcctacacgcagttctccaacctgtgccggcacaagcggatgcacgccgactgccgcacgcagatcaagtgcaaggactgtggccagatgttcagcactacctcctccctcaacaagcaccggcgcttctgcgagggcaagaaccattacacgccgggcggcatctttgccccgggcctgcccttgacccccagccccatgatggacaaggcaaaaccctcccccagcctcaatcacgccagcctgggcttcaacgagtactttccctccaggccgcacccggggagcctgcccttctccacggcgcctcccacgttccccgcactcacccccggcttcccgggcatcttccctccatccttgtacccccggccgcctctgctacctcccacatcgctgctcaagagccccctgaaccacacccaggacgccaagctccccagtcccctggggaacccagccctgcccctggtctccgccgtcagcaacagcagccagggcacgacggcagctgcggggcccgaggagaagttcgagagccgcctggaggactcctgtgtggagaagctgaagaccaggagcagcgacatgtcggacggcagtgactttgaggacgtcaacaccaccacggggaccgacctggacacgaccacggggacgggctcggacctggacagcgacgtggacagcgaccctgacaaggacaagggcaagggcaagtccgccgagggccagcccaagtttgggggcggcttggcgcccccgggggccccgaacagcgtggccgaggtgcctgtcttctattcccagcactcattcttcccgccacccgacgagcagctgctgactgcaacgggcgccgccggggactccatcaaggccatcgcatccattgccgagaagtactttggccccggcttcatggggatgcaggagaagaagctgggctcgctcccctaccactcggcgttccccttccagttcctgcccaacttcccccactccctttaccccttcacggaccgagccctcgcccacaacttgctggtcaaggccgagccaaagtcaccccgggacgccctcaaggtgggcggccccagtgccgagtgcccctttgatctcaccaccaagcccaaagacgtgaagcccatcctgcccatgcccaagggcccctcggcccccgcatccggcgaggagcagccgctggacctgagcatcggcagccgggcccgtgccagccaaaacggcggcgggcgggagccccgcaagaaccacgtctatggggaacgcaagctgggcgccggcgaggggctgccccaggtgtgcccggcgcggatgccccagcagcccccgctccactacgccaagccctcgcccttcttcatggaccccatctacagggtagaaaagcggaaggtcacagaccccgtgggagccctgaaggagaagtacctgcggccgtccccgctgctcttccacccccagatgtcagccatagagaccatgacagagaagctggagagctttgcagccatgaaggcggactcgggcagctccctgcagcccctcccccaccaccccttcaacttccggtccccacccccaacgctctccgaccccatcctcaggaagggcaaggagcgatacacgtgcaggtactgtgggaagatcttccccagatcagccaatctcaccagacacctgaggacgcacactggggagcagccgtacaggtgtaagtactgcgaccgctccttcagcatctcttcgaacctccagcggcacgtccggaacatccacaacaaggagaagcctttcaagtgccacctgtgcaaccgctgcttcgggcagcagaccaacctggaccggcacctcaagaagcacgagcacgagaacgcaccagtgagccagcaccccggggtcctcacgaaccacctggggaccagcgcgtcctctcccacctcagagtcggacaaccacgcacttttagacgagaaagaagactcttatttctcggaaatcagaaactttattgccaatagtgagatgaaccaagcatcaacgcgaacagagaaacgggcggacatgcagatcgtggacggcagtgcccagtgtccaggcctagccagtgagaagcaggaggacgtggaggaggaggacgacgatgacctggaggaggacgatgaggacagcctggccgggaagtcgcaggatgacaccgtgtcccccgcacccgagccccaggccgcctacgaggatgaggaggatgaggagccagccgcctccctggccgtgggctttgaccacacccgaaggtgtgctgaggaccacgaaggcggtctgttagctttggagccgatgccgacttttgggaaggggctggacctccgcagagcagctgaggaagcatttgaagttaaagatgtgcttaattccaccttagattctgaggctttaaaacatacactgtgcaggcaggctaagaaccaggcatatgcaatgatgctgtccctttccgaagacactcctctccacaccccctcccagggttctctggacgcttggttgaaggtcactggagccacgtcggagtctggagcatttcaccccatcaaccacctctgacgggctgggcagccgggggccggtggccagagcgagggcaccagccacgaaggacggaggcgggcggggccccggagaaccctgtccctgcgtgtggccactcctcagcatcctccccacccaccatggttcattccgacttttccaatggaaactcagatcccaaaagtccctaaagcagtcgtagagtctcaccatctccaaggattggtcttgagaacactgttcagtgacggccatgcaggtggccgtccaaagacagccaacggagctgcctcgcagaatcagccagtgggcaggtggacgctctgctgagacagaagctggtggccactgccgggtgcccgcgtggggtcgcggaagggaatggatagactggtgtgctcaaaagagagagatcactcaaatgatttttataatgaaatgacaagaataacccttttggtaaccgtattgactgcagagtctatttaagcatgtgg

SEQ ID NO: 222 - DNA, 8690 bp, Homo sapiens
gctgcttctggactcaaggaggaggagagagattccgcgagccgacaccatgcgatccaaggcgagggcgaggaagctagccaaaagtgacggtgacgttgtaaataatatgtatgagcccaaccgggacctgctggccagccacagcgcggaggacgaggccgaggacagtgccatgtcgcccatccccgtggggccaccgtcccccttccccaccagcgaggacttcacccccaaggagggctcgccgtacgaggcccctgtctacattcctgaagacattccgatcccagcagacttcgagctccgagagtcctccatcccaggggctggcctgggggtctgggccaagaggaagatggaagccggggagaggctgggcccctgcgtggtggtgccccgggcggcggcaaaggagacagacttcggatgggagcaaatactgacggacgtggaagtgtcgccccaggaaggctgcatcacaaagatctccgaagacctgggcagtgagaagttctgcgtggatgcaaatcaggcgggggctggcagctggctcaagtacatccgtgtggcgtgctcctgcgatgaccagaacctcaccatgtgtcagatcagtgagcagatttactataaagtcattaaggacattgagccaggtgaggagctgctggtgcacgtgaaggaaggcgtctaccccctgggcacagtgccgcccggcctggacgaggagcccacgttccgctgtgacgagtgtgacgaactcttccagtccaagctggacctgcggcgccataagaagtacacgtgtggctcagtgggggctgcgctctacgagggcctggctgaggagctcaagcccgagggccttggcggtggcagcggccaagcccacgagtgcaaggactgcgagcggatgttccccaacaagtacagcctggagcagcacatggtcatccacacggaggagcgcgagtacaaatgcgaccagtgtcccaaggccttcaactggaagtccaacctcatccgccaccagatgtcccacgacagcggcaaacgcttcgaatgtgaaaactgcgtgaaggtgttcacggaccccagcaaccttcagcggcacatccgctcgcagcacgtgggcgctcgggcccacgcctgccccgactgcgggaagaccttcgccacgtcctccggcctcaagcagcacaagcatatccacagcacggtgaagcctttcatatgtgaggtctgccacaagtcctacacgcagttctccaacctgtgccggcacaagcggatgcacgccgactgccgcacgcagatcaagtgcaaggactgtggccagatgttcagcactacctcctccctcaacaagcaccggcgcttctgcgagggcaagaaccattacacgccgggcggcatctttgccccgggcctgcccttgacccccagccccatgatggacaaggcaaaaccctcccccagcctcaatcacgccagcctgggcttcaacgagtactttccctccaggccgcacccggggagcctgcccttctccacggcgcctcccacgttccccgcactcacccccggcttcccgggcatcttccctccatccttgtacccccggccgcctctgctacctcccacatcgctgctcaagagccccctgaaccacacccaggacgccaagctccccagtcccctggggaacccagccctgcccctggtctccgccgtcagcaacagcagccagggcacgacggcagctgcggggcccgaggagaagttcgagagccgcctggaggactcctgtgtggagaagctgaagaccaggagcagcgacatgtcggacggcagtgactttgaggacgtcaacaccaccacggggaccgacctggacacgaccacggggacgggctcggacctggacagcgacgtggacagcgaccctgacaaggacaagggcaagggcaagtccgccgagggccagcccaagtttgggggcggcttggcgcccccgggggccccgaacagcgtggccgaggtgcctgtcttctattcccagcactcattcttcccgccacccgacgagcagctgctgactgcaacgggcgccgccggggactccatcaaggccatcgcatccattgccgagaagtactttggccccggcttcatggggatgcaggagaagaagctgggctcgctcccctaccactcggcgttccccttccagttcctgcccaacttcccccactccctttaccccttcacggaccgagccctcgcccacaacttgctggtcaaggccgagccaaagtcaccccgggacgccctcaaggtgggcggccccagtgccgagtgcccctttgatctcaccaccaagcccaaagacgtgaagcccatcctgcccatgcccaagggcccctcggcccccgcatccggcgaggagcagccgctggacctgagcatcggcagccgggcccgtgccagccaaaacggcggcgggcgggagccccgcaagaaccacgtctatggggaacgcaagctgggcgccggcgaggggctgccccaggtgtgcccggcgcggatgccccagcagcccccgctccactacgccaagccctcgcccttcttcatggaccccatctacagcagggtagaaaagcggaaggtcacagaccccgtgggagccctgaaggagaagtacctgcggccgtccccgctgctcttccacccccagatgtcagccatagagaccatgacagagaagctggagagctttgcagccatgaaggcggactcgggcagctccctgcagcccctcccccaccaccccttcaacttccggtccccacccccaacgctctccgaccccatcctcaggaagggcaaggagcgatacacgtgcaggtactgtgggaagatcttccccagatcagccaatctcaccagacacctgaggacgcacactggggagcagccgtacaggtgtaagtactgcgaccgctccttcagcatctcttcgaacctccagcggcacgtccggaacatccacaacaaggagaagcctttcaagtgccacctgtgcaaccgctgcttcgggcagcagaccaacctggaccggcacctcaagaagcacgagcacgagaacgcaccagtgagccagcaccccggggtcctcacgaaccacctggggaccagcgcgtcctctcccacctcagagtcggacaaccacgcacttttagacgagaaagaagactcttatttctcggaaatcagaaactttattgccaatagtgagatgaaccaagcatcaacgcgaacagagaaacgggcggacatgcagatcgtggacggcagtgcccagtgtccaggcctagccagtgagaagcaggaggacgtggaggaggaggacgacgatgacctggaggaggacgatgaggacagcctggccgggaagtcgcaggatgacaccgtgtcccccgcacccgagccccaggccgcctacgaggatgaggaggatgaggagccagccgcctccctggccgtgggctttgaccacacccgaaggtgtgctgaggaccacgaaggcggtctgttagctttggagccgatgccgacttttgggaaggggctggacctccgcagagcagctgaggaagcatttgaagttaaagatgtgcttaattccaccttagattctgaggctttaaaacatacactgtgcaggcaggctaagaaccaggcatatgcaatgatgctgtccctttccgaagacactcctctccacaccccctcccagggttctctggacgcttggttgaaggtcactggagccacgtcggagtctggagcatttcaccccatcaaccacctctgacgggctgggcagccgggggccggtggccagagcgagggcaccagccacgaaggacggaggcgggcggggccccggagaaccctgtccctgcgtgtggccactcctcagcatcctccccacccaccatggttcattccgacttttccaatggaaactcagatcccaaaagtccctaaagcagtcgtagagtctcaccatctccaaggattggtcttgagaacactgttcagtgacggccatgcaggtggccgtccaaagacagccaacggagctgcctcgcagaatcagccagtgggcaggtggacgctctgctgagacagaagctggtggccactgccgggtgcccgcgtggggtcgcggaagggaatggatagactggtgtgctcaaaagagagagatcactcaaatgatttttataatgaaatgacaagaataacccttttggtaaccgtattgactgcagagtctatttaagcatgtggttttaaaaatagacagtattttttaaaaatcaaaaaatgacttgcaaattgttttttaaaagtaattttgcattgctttgaaatttgagctcatttgcaaacccgagtctgcctgggaacccgcactgtgcctgggtgtattctttatactgtagataatggagaaattttctatctctgtccctatttgtataagccaaggtgatgctgggtgccccgaggcagaacaagaggcgcggggccacacccgtgaaccatgcagacggccgaagaagtcttaggcagggcgccctgggctgcaggcctgcccgaggctgggatgggaagtgtgcctgccctcgtgtgacatggaattggtgtcaggaccgccacgtggccttcagaggaatccacaggtccccacccaagatccctcaattatatggggaagtcgagggcctgtggcttggatccgccatgcagagatgtggccgggcacccatcttccttccctcctctgtccctgcctcggccaccccacgcgggaacccagcgccgtcctctgaaggcagggccttggccacgtcctgggtctcccacctcccacctgaccccagcggctccggtgtcctccacgtggctgccctggggagcaatcccagcggatcgctccgggccaccaagccgcacctgtgcctgagactccggatggacgacacagtcgtcacgtcgctcttcctgcgggttcttggcgagacacagcttgagaacagaagggcgtcgggggaacctgccgcaaggagcagagacagcacagccccccgggcccagccgcctccctctcttgggacgcaacttcttccccactcggatgggctttaaattattcccataggggccaatttcaaataataatttttttccctgatggaatttaccttaatctgtatataacttgtaattttttctaattcatttcttttcttattttatttcctccttaacagtatttttggcattagacattcttattgtgaagaaataatgttaatataagtatctggtgaaggaccaaaaccgtgtgataaggttgtgtgtcgtgtgggagtggggcgattttttatgtgccaaatacccccgtcccccccatgaatcctgctgtccctgctgccgtttaccagacaatcatatgtttttgttaaatttgcgtttcagttacatttgcatttaagacaagtgttctatttatttcttgtattgtttggaagaaaaaatgatgatagagtcccaaaaagaagagaaaaaaaatgcccaagttgccctttaaaaaaaaagagcgtaaatacaaacaggagtggtgcaagccgccttggtgtgggtttgtgtcacgtgtggacatctcctcaggctttgtgtcacgcgtggacatctcctcaggctgtccccagcggtgacgggaggtgtcctggctgctccaggacaaaagacaatcgtctctgtgggtgccgggtggtccaggcttgcactgaagacgtgccacggggaggctcctgcaggaggctcaacccgacggatcacagtgaaagggattcctcccacgccagatctgcacaacgaggcaagacaggacccacctgtgcgtgcgctggggccatggggtggccccgccggggcagcgggggagctgcctgcagaagagccagctggcgtgtcgggaaggatccaggatctgcaaacacaactgctcaggccttctcacgcgtttccacaacatcccctgggtcagacccaccaggtaccccgtaggaatttccagtttcccttgatctagatgggattcttataaaaattcaacctcagacataaacaccccatttctgtaaacccaaattatatggtttcttctgcgaaagagtaaggtgtgtgcttttttttttttgcaatatgaccccgtctctctgaagtgggacattcggacggatggagccctcagcgtgtcttttcagcaggagcagaaccgatgagagccgcccttaccgttggtctccggatcccccagtcccatcccgccgttttcggctgtcttcctaaccgtcctgtcttctcttggcgctctttccttccacctttcccaagagtcctggttgcacgttttaagtcatatattttcgtccccctgaaaatgatggcaagcccagtttctcctgagcattcagacccccaggccccagcacttggcgttttcaggaggccctgttcttagagcccctgacaaaggcagcacttatttcctgggctggtgcgccccaaaacacggccccgacacttagtgtggccccaggccccagcgagcctcgccctcccagttttgctctgcccagcagtgttggtgcccagagatgacaagggccagggagcctggcccgggtgtgagaattcagagattctggcctccagctgtcaccacaccgtaacggggccatgtaactgtgcagcatggacagggatgcgacggggcagctggctgtgtccatggccaggtggccagggtcagggctgcaagccaggggtccagggcccttccgttcagcccaaatgctgccccaatgctaactccttggattgtcaacccccatcccccaaatggaaattccgaaggaggcctcctcgcacctgccctccgctgctcctcagaccccagcccccagcgagccgacgtccccacccgttcctgctctcatccccaggttgggcacgtggggttcctcctctgtgggcctggcagacccttcatgagtgggacccaagatatcactgacttcaacccagaggatcgagcccctgcaccctgcctggggccctggggtgtggagcagtggctggggtgggcgtggtgtggcctgagagactgcccagctggagaggccttcctttacaaggccacgcgtgcagctgtcccatccagaccccgactggccaagacctccacgtccccagagtccagccctggaaattccaagggccctggcgtcctctgccttccccgcttccccatgagcgtctgcaaaacacttgcctgaatacatatcacgtattttagactcgaagcctcaaagcactggattgtggtcccctgccccctctgtcccgtccccctgcccaagtgactgaaacctactgagctatattcactgtgctgtcctagggggagggagagcagagctcgcccctgcactgcagccttgtgggggagggcaaggctctcctcccagccagggacgccaggacatagctgctcctggtcagtggaggtcagccgggtatcaaaagccatgaaactgtgtctctgtagcaatgagtgatactgtgacaaaaccatccttgcattcttcctagaagagttcctctgctccttccattccatttttgtgtttgttttgttcttttctgtcactgatccgtattaccacttttggaaaaaaataaataaataaataaataaaaggcagcttgagtttccaaacgtgtgattcacttgtgaacaaaagtcattctaacaattgccttcagcgtcacgtgcattgccactgcgctttcggcacgagggatgctgagccctggtgtcagagtcgtaatttaaagcgtgtgtgtatatggactttgtcccttaaggtcgatataaagaatcctcgcagaatcacagacctgtgccgcccgccaccttctgccattgttacattacagatttggtttagttttgttttgttttgttttttcttttagaactgtatagtattgaaaaagaaatcaaatgtaaatgtctggttttcatataatgtttaaaaagaccattgagaaggaggctggcgctcgccccatgtcccccttgattgtaaattgcttctgttctgtttataagtaaactgtgcatgactcctgcttagcggtcattatcgtgtctgttggtgaaatttttattaaaaggaaaattctgtagatgcacttattgaatatgtgattaggatctacgtctgagactaggagtcctgaactgctgacgcgaaagaggcgcagttcccaattaatacggaaatcgctgtgggagaagaatgaaataagacgtgaagtgtaggaaatcatgaaaagaacaattttgcaaattgcattctgatgcttgtgatgaacacaaatgtacttgtgtagagacatttccttaagagaaagcctaggagaagccgatttggaggttaatgctgtagaataggactgtataccaaatgtaatctttccaatgctccaatgaatttatacatgagattgatatgcaataaatctgtgtgcttttctaa

SEQ ID NO: 223 - DNA, 8718 bp, Homo sapiens
ctgacaatgctggggagatgaagatagtgtgtggctgcttctggactcaaggaggaggagagagattccgcgagccgacaccatgcgatccaaggcgagggcgaggaagctagccaaaagtgacggtgacgttgtaaataatatgtatgagcccaaccgggacctgctggccagccacagcgcggaggacgaggccgaggacagtgccatgtcgcccatccccgtggggccaccgtcccccttccccaccagcgaggacttcacccccaaggagggctcgccgtacgaggcccctgtctacattcctgaagacattccgatcccagcagacttcgagctccgagagtcctccatcccaggggctggcctgggggtctgggccaagaggaagatggaagccggggagaggctgggcccctgcgtggtggtgccccgggcggcggcaaaggagacagacttcggatgggagcaaatactgacggacgtggaagtgtcgccccaggaaggctgcatcacaaagatctccgaagacctgggcagtgagaagttctgcgtggatgcaaatcaggcgggggctggcagctggctcaagtacatccgtgtggcgtgctcctgcgatgaccagaacctcaccatgtgtcagatcagtgagcagatttactataaagtcattaaggacattgagccaggtgaggagctgctggtgcacgtgaaggaaggcgtctaccccctgggcacagtgccgcccggcctggacgaggagcccacgttccgctgtgacgagtgtgacgaactcttccagtccaagctggacctgcggcgccataagaagtacacgtgtggctcagtgggggctgcgctctacgagggcctggctgaggagctcaagcccgagggccttggcggtggcagcggccaagcccacgagtgcaaggactgcgagcggatgttccccaacaagtacagcctggagcagcacatggtcatccacacggaggagcgcgagtacaaatgcgaccagtgtcccaaggccttcaactggaagtccaacctcatccgccaccagatgtcccacgacagcggcaaacgcttcgaatgtgaaaactgcgtgaaggtgttcacggaccccagcaaccttcagcggcacatccgctcgcagcacgtgggcgctcgggcccacgcctgccccgactgcgggaagaccttcgccacgtcctccggcctcaagcagcacaagcatatccacagcacggtgaagcctttcatatgtgaggtctgccacaagtcctacacgcagttctccaacctgtgccggcacaagcggatgcacgccgactgccgcacgcagatcaagtgcaaggactgtggccagatgttcagcactacctcctccctcaacaagcaccggcgcttctgcgagggcaagaaccattacacgccgggcggcatctttgccccgggcctgcccttgacccccagccccatgatggacaaggcaaaaccctcccccagcctcaatcacgccagcctgggcttcaacgagtactttccctccaggccgcacccggggagcctgcccttctccacggcgcctcccacgttccccgcactcacccccggcttcccgggcatcttccctccatccttgtacccccggccgcctctgctacctcccacatcgctgctcaagagccccctgaaccacacccaggacgccaagctccccagtcccctggggaacccagccctgcccctggtctccgccgtcagcaacagcagccagggcacgacggcagctgcggggcccgaggagaagttcgagagccgcctggaggactcctgtgtggagaagctgaagaccaggagcagcgacatgtcggacggcagtgactttgaggacgtcaacaccaccacggggaccgacctggacacgaccacggggacgggctcggacctggacagcgacgtggacagcgaccctgacaaggacaagggcaagggcaagtccgccgagggccagcccaagtttgggggcggcttggcgcccccgggggccccgaacagcgtggccgaggtgcctgtcttctattcccagcactcattcttcccgccacccgacgagcagctgctgactgcaacgggcgccgccggggactccatcaaggccatcgcatccattgccgagaagtactttggccccggcttcatggggatgcaggagaagaagctgggctcgctcccctaccactcggcgttccccttccagttcctgcccaacttcccccactccctttaccccttcacggaccgagccctcgcccacaacttgctggtcaaggccgagccaaagtcaccccgggacgccctcaaggtgggcggccccagtgccgagtgcccctttgatctcaccaccaagcccaaagacgtgaagcccatcctgcccatgcccaagggcccctcggcccccgcatccggcgaggagcagccgctggacctgagcatcggcagccgggcccgtgccagccaaaacggcggcgggcgggagccccgcaagaaccacgtctatggggaacgcaagctgggcgccggcgaggggctgccccaggtgtgcccggcgcggatgccccagcagcccccgctccactacgccaagccctcgcccttcttcatggaccccatctacagggtagaaaagcggaaggtcacagaccccgtgggagccctgaaggagaagtacctgcggccgtccccgctgctcttccacccccagatgtcagccatagagaccatgacagagaagctggagagctttgcagccatgaaggcggactcgggcagctccctgcagcccctcccccaccaccccttcaacttccggtccccacccccaacgctctccgaccccatcctcaggaagggcaaggagcgatacacgtgcaggtactgtgggaagatcttccccagatcagccaatctcaccagacacctgaggacgcacactggggagcagccgtacaggtgtaagtactgcgaccgctccttcagcatctcttcgaacctccagcggcacgtccggaacatccacaacaaggagaagcctttcaagtgccacctgtgcaaccgctgcttcgggcagcagaccaacctggaccggcacctcaagaagcacgagcacgagaacgcaccagtgagccagcaccccggggtcctcacgaaccacctggggaccagcgcgtcctctcccacctcagagtcggacaaccacgcacttttagacgagaaagaagactcttatttctcggaaatcagaaactttattgccaatagtgagatgaaccaagcatcaacgcgaacagagaaacgggcggacatgcagatcgtggacggcagtgcccagtgtccaggcctagccagtgagaagcaggaggacgtggaggaggaggacgacgatgacctggaggaggacgatgaggacagcctggccgggaagtcgcaggatgacaccgtgtcccccgcacccgagccccaggccgcctacgaggatgaggaggatgaggagccagccgcctccctggccgtgggctttgaccacacccgaaggtgtgctgaggaccacgaaggcggtctgttagctttggagccgatgccgacttttgggaaggggctggacctccgcagagcagctgaggaagcatttgaagttaaagatgtgcttaattccaccttagattctgaggctttaaaacatacactgtgcaggcaggctaagaaccaggcatatgcaatgatgctgtccctttccgaagacactcctctccacaccccctcccagggttctctggacgcttggttgaaggtcactggagccacgtcggagtctggagcatttcaccccatcaaccacctctgacgggctgggcagccgggggccggtggccagagcgagggcaccagccacgaaggacggaggcgggcggggccccggagaaccctgtccctgcgtgtggccactcctcagcatcctccccacccaccatggttcattccgacttttccaatggaaactcagatcccaaaagtccctaaagcagtcgtagagtctcaccatctccaaggattggtcttgagaacactgttcagtgacggccatgcaggtggccgtccaaagacagccaacggagctgcctcgcagaatcagccagtgggcaggtggacgctctgctgagacagaagctggtggccactgccgggtgcccgcgtggggtcgcggaagggaatggatagactggtgtgctcaaaagagagagatcactcaaatgatttttataatgaaatgacaagaataacccttttggtaaccgtattgactgcagagtctatttaagcatgtggttttaaaaatagacagtattttttaaaaatcaaaaaatgacttgcaaattgttttttaaaagtaattttgcattgctttgaaatttgagctcatttgcaaacccgagtctgcctgggaacccgcactgtgcctgggtgtattctttatactgtagataatggagaaattttctatctctgtccctatttgtataagccaaggtgatgctgggtgccccgaggcagaacaagaggcgcggggccacacccgtgaaccatgcagacggccgaagaagtcttaggcagggcgccctgggctgcaggcctgcccgaggctgggatgggaagtgtgcctgccctcgtgtgacatggaattggtgtcaggaccgccacgtggccttcagaggaatccacaggtccccacccaagatccctcaattatatggggaagtcgagggcctgtggcttggatccgccatgcagagatgtggccgggcacccatcttccttccctcctctgtccctgcctcggccaccccacgcgggaacccagcgccgtcctctgaaggcagggccttggccacgtcctgggtctcccacctcccacctgaccccagcggctccggtgtcctccacgtggctgccctggggagcaatcccagcggatcgctccgggccaccaagccgcacctgtgcctgagactccggatggacgacacagtcgtcacgtcgctcttcctgcgggttcttggcgagacacagcttgagaacagaagggcgtcgggggaacctgccgcaaggagcagagacagcacagccccccgggcccagccgcctccctctcttgggacgcaacttcttccccactcggatgggctttaaattattcccataggggccaatttcaaataataatttttttccctgatggaatttaccttaatctgtatataacttgtaattttttctaattcatttcttttcttattttatttcctccttaacagtatttttggcattagacattcttattgtgaagaaataatgttaatataagtatctggtgaaggaccaaaaccgtgtgataaggttgtgtgtcgtgtgggagtggggcgattttttatgtgccaaatacccccgtcccccccatgaatcctgctgtccctgctgccgtttaccagacaatcatatgtttttgttaaatttgcgtttcagttacatttgcatttaagacaagtgttctatttatttcttgtattgtttggaagaaaaaatgatgatagagtcccaaaaagaagagaaaaaaaatgcccaagttgccctttaaaaaaaaagagcgtaaatacaaacaggagtggtgcaagccgccttggtgtgggtttgtgtcacgtgtggacatctcctcaggctttgtgtcacgcgtggacatctcctcaggctgtccccagcggtgacgggaggtgtcctggctgctccaggacaaaagacaatcgtctctgtgggtgccgggtggtccaggcttgcactgaagacgtgccacggggaggctcctgcaggaggctcaacccgacggatcacagtgaaagggattcctcccacgccagatctgcacaacgaggcaagacaggacccacctgtgcgtgcgctggggccatggggtggccccgccggggcagcgggggagctgcctgcagaagagccagctggcgtgtcgggaaggatccaggatctgcaaacacaactgctcaggccttctcacgcgtttccacaacatcccctgggtcagacccaccaggtaccccgtaggaatttccagtttcccttgatctagatgggattcttataaaaattcaacctcagacataaacaccccatttctgtaaacccaaattatatggtttcttctgcgaaagagtaaggtgtgtgcttttttttttttgcaatatgaccccgtctctctgaagtgggacattcggacggatggagccctcagcgtgtcttttcagcaggagcagaaccgatgagagccgcccttaccgttggtctccggatcccccagtcccatcccgccgttttcggctgtcttcctaaccgtcctgtcttctcttggcgctctttccttccacctttcccaagagtcctggttgcacgttttaagtcatatattttcgtccccctgaaaatgatggcaagcccagtttctcctgagcattcagacccccaggccccagcacttggcgttttcaggaggccctgttcttagagcccctgacaaaggcagcacttatttcctgggctggtgcgccccaaaacacggccccgacacttagtgtggccccaggccccagcgagcctcgccctcccagttttgctctgcccagcagtgttggtgcccagagatgacaagggccagggagcctggcccgggtgtgagaattcagagattctggcctccagctgtcaccacaccgtaacggggccatgtaactgtgcagcatggacagggatgcgacggggcagctggctgtgtccatggccaggtggccagggtcagggctgcaagccaggggtccagggcccttccgttcagcccaaatgctgccccaatgctaactccttggattgtcaacccccatcccccaaatggaaattccgaaggaggcctcctcgcacctgccctccgctgctcctcagaccccagcccccagcgagccgacgtccccacccgttcctgctctcatccccaggttgggcacgtggggttcctcctctgtgggcctggcagacccttcatgagtgggacccaagatatcactgacttcaacccagaggatcgagcccctgcaccctgcctggggccctggggtgtggagcagtggctggggtgggcgtggtgtggcctgagagactgcccagctggagaggccttcctttacaaggccacgcgtgcagctgtcccatccagaccccgactggccaagacctccacgtccccagagtccagccctggaaattccaagggccctggcgtcctctgccttccccgcttccccatgagcgtctgcaaaacacttgcctgaatacatatcacgtattttagactcgaagcctcaaagcactggattgtggtcccctgccccctctgtcccgtccccctgcccaagtgactgaaacctactgagctatattcactgtgctgtcctagggggagggagagcagagctcgcccctgcactgcagccttgtgggggagggcaaggctctcctcccagccagggacgccaggacatagctgctcctggtcagtggaggtcagccgggtatcaaaagccatgaaactgtgtctctgtagcaatgagtgatactgtgacaaaaccatccttgcattcttcctagaagagttcctctgctccttccattccatttttgtgtttgttttgttcttttctgtcactgatccgtattaccacttttggaaaaaaataaataaataaataaataaaaggcagcttgagtttccaaacgtgtgattcacttgtgaacaaaagtcattctaacaattgccttcagcgtcacgtgcattgccactgcgctttcggcacgagggatgctgagccctggtgtcagagtcgtaatttaaagcgtgtgtgtatatggactttgtcccttaaggtcgatataaagaatcctcgcagaatcacagacctgtgccgcccgccaccttctgccattgttacattacagatttggtttagttttgttttgttttgttttttcttttagaactgtatagtattgaaaaagaaatcaaatgtaaatgtctggttttcatataatgtttaaaaagaccattgagaaggaggctggcgctcgccccatgtcccccttgattgtaaattgcttctgttctgtttataagtaaactgtgcatgactcctgcttagcggtcattatcgtgtctgttggtgaaatttttattaaaaggaaaattctgtagatgcacttattgaatatgtgattaggatctacgtctgagactaggagtcctgaactgctgacgcgaaagaggcgcagttcccaattaatacggaaatcgctgtgggagaagaatgaaataagacgtgaagtgtaggaaatcatgaaaagaacaattttgcaaattgcattctgatgcttgtgatgaacacaaatgtacttgtgtagagacatttccttaagagaaagcctaggagaagccgatttggaggttaatgctgtagaataggactgtataccaaatgtaatctttccaatgctccaatgaatttatacatgagattgatatgcaataaatctgtgtgcttttct

SEQ ID NO: 224 - DNA, 8661 bp, Homo sapiens
ctgacaatgctggggagatgaagatagtgtgtggctgcttctggactcaaggaggaggagagagattccgcgagccgacaccatgcgatccaaggcgagggcgaggaagctagccaaaagtgacggtgacgttgtaaataatatgtatgagcccaaccgggacctgctggccagccacagcgcggaggacgaggccgaggacagtgccatgtcgcccatccccgtggggccaccgtcccccttccccaccagcgaggacttcacccccaaggagggctcgccgtacgaggcccctgtctacattcctgaagacattccgatcccagcagacttcgagctccgagagtcctccatcccaggggctggcctgggggtctgggccaagaggaagatggaagccggggagaggctgggcccctgcgtggtggtgccccgggcggcggcaaaggagacagacttcggatgggagcaaatactgacggacgtggaagtgtcgccccaggaaggctgcatcacaaagatctccgaagacctgggcagtgagaagttctgcgtggatgcaaatcaggcgggggctggcagctggctcaagtacatccgtgtggcgtgctcctgcgatgaccagaacctcaccatgtgtcagatcagtgagcagatttactataaagtcattaaggacattgagccaggtgaggagctgctggtgcacgtgaaggaaggcgtctaccccctgggcacagtgccgcccggcctggacgaggagcccacgttccgctgtgacgagtgtgacgaactcttccagtccaagctggacctgcggcgccataagaagtacacgtgtggctcagtgggggctgcgctctacgagggcctggctgaggagctcaagcccgagggccttggcggtggcagcggccaagcccacgagtgcaaggactgcgagcggatgttccccaacaagtacagcctggagcagcacatggtcatccacacggaggagcgcgagtacaaatgcgaccagtgtcccaaggccttcaactggaagtccaacctcatccgccaccagatgtcccacgacagcggcaaacgcttcgaatgtgaaaactgcgtgaaggtgttcacggaccccagcaaccttcagcggcacatccgctcgcagcacgtgggcgctcgggcccacgcctgccccgactgcgggaagaccttcgccacgtcctccggcctcaagcagcacaagcatatccacagcacggtgaagcctttcatatgtgaggtctgccacaagtcctacacgcagttctccaacctgtgccggcacaagcggatgcacgccgactgccgcacgcagatcaagtgcaaggactgtggccagatgttcagcactacctcctccctcaacaagcaccggcgcttctgcgagggcaagaaccattacacgccgggcggcatctttgccccgggcctgcccttgacccccagccccatgatggacaaggcaaaaccctcccccagcctcaatcacgccagcctgggcttcaacgagtactttccctccaggccgcacccggggagcctgcccttctccacggcgcctcccacgttccccgcactcacccccggcttcccgggcatcttccctccatccttgtacccccggccgcctctgctacctcccacatcgctgctcaagagccccctgaaccacacccaggacgccaagctccccagtcccctggggaacccagccctgcccctggtctccgccgtcagcaacagcagccagggcacgacggcagctgcggggcccgaggagaagttcgagagccgcctggaggactcctgtgtggagaagctgaagaccaggagcagcgacatgtcggacggcagtgactttgaggacgtcaacaccaccacggggaccgacctggacacgaccacggggacgggctcggacctggacagcgacgtggacagcgaccctgacaaggacaagggcaagggcaagtccgccgagggccagcccaagtttgggggcggcttggcgcccccgggggccccgaacagcgtggccgaggtgcctgtcttctattcccagcactcattcttcccgccacccgacgagcagctgctgactgcaacgggcgccgccggggactccatcaaggccatcgcatccattgccgagaagtactttggccccggcttcatggggatgcaggagaagaagctgggctcgctcccctaccactcggcgttccccttccagttcctgcccaacttcccccactccctttaccccttcacggaccgagccctcgcccacaacttgctggtcaaggccgagccaaagtcaccccgggacgccctcaaggtgggcggccccagtgccgagtgcccctttgatctcaccaccaagcccaaagacgtgaagcccatcctgcccatgcccaagggcccctcggcccccgcatccggcgaggagcagccgctggacctgagcatcggcagccgggcccgtgccagccaaaacggcggcgggcgggagccccgcaagaaccacgtctatggggaacgcaagctgggcgccggcgaggggctgccccaggtgtgcccggcgcggatgccccagcagcccccgctccactacgccaagccctcgcccttcttcatggaccccatctacagggtagaaaagcggaaggtcacagaccccgtgggagccctgaaggagaagtacctgcggccgtccccgctgctcttccacccccagatgtcagccatagagaccatgacagagaagctggagagctttgcagccatgaaggcggactcgggcagctccctgcagcccctcccccaccaccccttcaacttccggtccccacccccaacgctctccgaccccatcctcaggaagggcaaggagcgatacacgtgcaggtactgtgggaagatcttccccagatcagccaatctcaccagacacctgaggacgcacactggggagcagccgtacaggtgtaagtactgcgaccgctccttcagcatctcttcgaacctccagcggcacgtccggaacatccacaacaaggagaagcctttcaagtgccacctgtgcaaccgctgcttcgggcagcagaccaacctggaccggcacctcaagaagcacgagcacgagaacgcaccagtgagccagcaccccggggtcctcacgaaccacctggggaccagcgcgtcctctcccacctcagagtcggacaaccacgcacttttagacgagaaagaagactcttatttctcggaaatcagaaactttattgccaatagtgagatgaaccaagcatcaacgcgaacagagaaacgggcggacatgcagatcgtggacggcagtgcccagtgtccaggcctagccagtgagaagcaggaggacgtggaggaggaggacgacgatgacctggaggaggacgatgaggacagcctggccgggaagtcgcaggatgacaccgtgtcccccgcacccgagccccaggccgcctacgaggatgaggaggatgaggagccagccgcctccctggccgtgggctttgaccacacccgaaggtgtgctgaggaccacgaaggcggtctgttagctttggagccgatgccgacttttgggaaggggctggacctccgcagagcagctgaggaagcatttgaagttaaagatgtgcttaattccaccttagattctgaggctttaaaacatacactgtgcaggcaggctaagaaccagggttctctggacgcttggttgaaggtcactggagccacgtcggagtctggagcatttcaccccatcaaccacctctgacgggctgggcagccgggggccggtggccagagcgagggcaccagccacgaaggacggaggcgggcggggccccggagaaccctgtccctgcgtgtggccactcctcagcatcctccccacccaccatggttcattccgacttttccaatggaaactcagatcccaaaagtccctaaagcagtcgtagagtctcaccatctccaaggattggtcttgagaacactgttcagtgacggccatgcaggtggccgtccaaagacagccaacggagctgcctcgcagaatcagccagtgggcaggtggacgctctgctgagacagaagctggtggccactgccgggtgcccgcgtggggtcgcggaagggaatggatagactggtgtgctcaaaagagagagatcactcaaatgatttttataatgaaatgacaagaataacccttttggtaaccgtattgactgcagagtctatttaagcatgtggttttaaaaatagacagtattttttaaaaatcaaaaaatgacttgcaaattgttttttaaaagtaattttgcattgctttgaaatttgagctcatttgcaaacccgagtctgcctgggaacccgcactgtgcctgggtgtattctttatactgtagataatggagaaattttctatctctgtccctatttgtataagccaaggtgatgctgggtgccccgaggcagaacaagaggcgcggggccacacccgtgaaccatgcagacggccgaagaagtcttaggcagggcgccctgggctgcaggcctgcccgaggctgggatgggaagtgtgcctgccctcgtgtgacatggaattggtgtcaggaccgccacgtggccttcagaggaatccacaggtccccacccaagatccctcaattatatggggaagtcgagggcctgtggcttggatccgccatgcagagatgtggccgggcacccatcttccttccctcctctgtccctgcctcggccaccccacgcgggaacccagcgccgtcctctgaaggcagggccttggccacgtcctgggtctcccacctcccacctgaccccagcggctccggtgtcctccacgtggctgccctggggagcaatcccagcggatcgctccgggccaccaagccgcacctgtgcctgagactccggatggacgacacagtcgtcacgtcgctcttcctgcgggttcttggcgagacacagcttgagaacagaagggcgtcgggggaacctgccgcaaggagcagagacagcacagccccccgggcccagccgcctccctctcttgggacgcaacttcttccccactcggatgggctttaaattattcccataggggccaatttcaaataataatttttttccctgatggaatttaccttaatctgtatataacttgtaattttttctaattcatttcttttcttattttatttcctccttaacagtatttttggcattagacattcttattgtgaagaaataatgttaatataagtatctggtgaaggaccaaaaccgtgtgataaggttgtgtgtcgtgtgggagtggggcgattttttatgtgccaaatacccccgtcccccccatgaatcctgctgtccctgctgccgtttaccagacaatcatatgtttttgttaaatttgcgtttcagttacatttgcatttaagacaagtgttctatttatttcttgtattgtttggaagaaaaaatgatgatagagtcccaaaaagaagagaaaaaaaatgcccaagttgccctttaaaaaaaaagagcgtaaatacaaacaggagtggtgcaagccgccttggtgtgggtttgtgtcacgtgtggacatctcctcaggctttgtgtcacgcgtggacatctcctcaggctgtccccagcggtgacgggaggtgtcctggctgctccaggacaaaagacaatcgtctctgtgggtgccgggtggtccaggcttgcactgaagacgtgccacggggaggctcctgcaggaggctcaacccgacggatcacagtgaaagggattcctcccacgccagatctgcacaacgaggcaagacaggacccacctgtgcgtgcgctggggccatggggtggccccgccggggcagcgggggagctgcctgcagaagagccagctggcgtgtcgggaaggatccaggatctgcaaacacaactgctcaggccttctcacgcgtttccacaacatcccctgggtcagacccaccaggtaccccgtaggaatttccagtttcccttgatctagatgggattcttataaaaattcaacctcagacataaacaccccatttctgtaaacccaaattatatggtttcttctgcgaaagagtaaggtgtgtgcttttttttttttgcaatatgaccccgtctctctgaagtgggacattcggacggatggagccctcagcgtgtcttttcagcaggagcagaaccgatgagagccgcccttaccgttggtctccggatcccccagtcccatcccgccgttttcggctgtcttcctaaccgtcctgtcttctcttggcgctctttccttccacctttcccaagagtcctggttgcacgttttaagtcatatattttcgtccccctgaaaatgatggcaagcccagtttctcctgagcattcagacccccaggccccagcacttggcgttttcaggaggccctgttcttagagcccctgacaaaggcagcacttatttcctgggctggtgcgccccaaaacacggccccgacacttagtgtggccccaggccccagcgagcctcgccctcccagttttgctctgcccagcagtgttggtgcccagagatgacaagggccagggagcctggcccgggtgtgagaattcagagattctggcctccagctgtcaccacaccgtaacggggccatgtaactgtgcagcatggacagggatgcgacggggcagctggctgtgtccatggccaggtggccagggtcagggctgcaagccaggggtccagggcccttccgttcagcccaaatgctgccccaatgctaactccttggattgtcaacccccatcccccaaatggaaattccgaaggaggcctcctcgcacctgccctccgctgctcctcagaccccagcccccagcgagccgacgtccccacccgttcctgctctcatccccaggttgggcacgtggggttcctcctctgtgggcctggcagacccttcatgagtgggacccaagatatcactgacttcaacccagaggatcgagcccctgcaccctgcctggggccctggggtgtggagcagtggctggggtgggcgtggtgtggcctgagagactgcccagctggagaggccttcctttacaaggccacgcgtgcagctgtcccatccagaccccgactggccaagacctccacgtccccagagtccagccctggaaattccaagggccctggcgtcctctgccttccccgcttccccatgagcgtctgcaaaacacttgcctgaatacatatcacgtattttagactcgaagcctcaaagcactggattgtggtcccctgccccctctgtcccgtccccctgcccaagtgactgaaacctactgagctatattcactgtgctgtcctagggggagggagagcagagctcgcccctgcactgcagccttgtgggggagggcaaggctctcctcccagccagggacgccaggacatagctgctcctggtcagtggaggtcagccgggtatcaaaagccatgaaactgtgtctctgtagcaatgagtgatactgtgacaaaaccatccttgcattcttcctagaagagttcctctgctccttccattccatttttgtgtttgttttgttcttttctgtcactgatccgtattaccacttttggaaaaaaataaataaataaataaataaaaggcagcttgagtttccaaacgtgtgattcacttgtgaacaaaagtcattctaacaattgccttcagcgtcacgtgcattgccactgcgctttcggcacgagggatgctgagccctggtgtcagagtcgtaatttaaagcgtgtgtgtatatggactttgtcccttaaggtcgatataaagaatcctcgcagaatcacagacctgtgccgcccgccaccttctgccattgttacattacagatttggtttagttttgttttgttttgttttttcttttagaactgtatagtattgaaaaagaaatcaaatgtaaatgtctggttttcatataatgtttaaaaagaccattgagaaggaggctggcgctcgccccatgtcccccttgattgtaaattgcttctgttctgtttataagtaaactgtgcatgactcctgcttagcggtcattatcgtgtctgttggtgaaatttttattaaaaggaaaattctgtagatgcacttattgaatatgtgattaggatctacgtctgagactaggagtcctgaactgctgacgcgaaagaggcgcagttcccaattaatacggaaatcgctgtgggagaagaatgaaataagacgtgaagtgtaggaaatcatgaaaagaacaattttgcaaattgcattctgatgcttgtgatgaacacaaatgtacttgtgtagagacatttccttaagagaaagcctaggagaagccgatttggaggttaatgctgtagaataggactgtataccaaatgtaatctttccaatgctccaatgaatttatacatgagattgatatgcaataaatctgtgtgcttttct

SEQ ID NO: 225 - DNA, 1603 bp, Homo sapiens
gggaggaggcagtgggagggcggagggcgggggccttcggggtgggcgcccagggtagggcaggtggccgcggcgtggaggcagggagaatgcgactctccaaaaccctcgtcgacatggacatggccgactacagtgctgcactggacccagcctacaccaccctggaatttgagaatgtgcaggtgttgacgatgggcaatgacacgtccccatcagaaggcaccaacctcaacgcgcccaacagcctgggtgtcagcgccctgtgtgccatctgcggggaccgggccacgggcaaacactacggtgcctcgagctgtgacggctgcaagggcttcttccggaggagcgtgcggaagaaccacatgtactcctgcagatttagccggcagtgcgtggtggacaaagacaagaggaaccagtgccgctactgcaggctcaagaaatgcttccgggctggcatgaagaaggaagccgtccagaatgagcgggaccggatcagcactcgaaggtcaagctatgaggacagcagcctgccctccatcaatgcgctcctgcaggcggaggtcctgtcccgacagatcacctcccccgtctccgggatcaacggcgacattcgggcgaagaagattgccagcatcgcagatgtgtgtgagtccatgaaggagcagctgctggttctcgttgagtgggccaagtacatcccagctttctgcgagctccccctggacgaccaggtggccctgctcagagcccatgctggcgagcacctgctgctcggagccaccaagagatccatggtgttcaaggacgtgctgctcctaggcaatgactacattgtccctcggcactgcccggagctggcggagatgagccgggtgtccatacgcatccttgacgagctggtgctgcccttccaggagctgcagatcgatgacaatgagtatgcctacctcaaagccatcatcttctttgacccagatgccaaggggctgagcgatccagggaagatcaagcggctgcgttcccaggtgcaggtgagcttggaggactacatcaacgaccgccagtatgactcgcgtggccgctttggagagctgctgctgctgctgcccaccttgcagagcatcacctggcagatgatcgagcagatccagttcatcaagctcttcggcatggccaagattgacaacctgttgcaggagatgctgctgggaggtccgtgccaagcccaggaggggcggggttggagtggggactccccaggagacaggcctcacacagtgagctcacccctcagctccttggcttccccactgtgccgctttgggcaagttgcttaacctgtctgtgcctcagtttcctcaccagaaaaatgggaacaaggcaatggtctatttgttcaggcaccgagaacctagcacgtgccagtcactgttctaagtgctggcaattcagcaaagaacaagatctttgccctcggggaggctgtgtgtgtgtgagtatgtatggatgcgtggatatctgtgtatatgcccgtatgtgcgtgcatgtgtatataaagcctcacattttatgattttgaaataaacaggtaatatga

SEQ ID NO: 226 - DNA, 3235 bp, Homo sapiens
gggaggaggcagtgggagggcggagggcgggggccttcggggtgggcgcccagggtagggcaggtggccgcggcgtggaggcagggagaatgcgactctccaaaaccctcgtcgacatggacatggccgactacagtgctgcactggacccagcctacaccaccctggaatttgagaatgtgcaggtgttgacgatgggcaatgacacgtccccatcagaaggcaccaacctcaacgcgcccaacagcctgggtgtcagcgccctgtgtgccatctgcggggaccgggccacgggcaaacactacggtgcctcgagctgtgacggctgcaagggcttcttccggaggagcgtgcggaagaaccacatgtactcctgcagatttagccggcagtgcgtggtggacaaagacaagaggaaccagtgccgctactgcaggctcaagaaatgcttccgggctggcatgaagaaggaagccgtccagaatgagcgggaccggatcagcactcgaaggtcaagctatgaggacagcagcctgccctccatcaatgcgctcctgcaggcggaggtcctgtcccgacagatcacctcccccgtctccgggatcaacggcgacattcgggcgaagaagattgccagcatcgcagatgtgtgtgagtccatgaaggagcagctgctggttctcgttgagtgggccaagtacatcccagctttctgcgagctccccctggacgaccaggtggccctgctcagagcccatgctggcgagcacctgctgctcggagccaccaagagatccatggtgttcaaggacgtgctgctcctaggcaatgactacattgtccctcggcactgcccggagctggcggagatgagccgggtgtccatacgcatccttgacgagctggtgctgcccttccaggagctgcagatcgatgacaatgagtatgcctacctcaaagccatcatcttctttgacccagatgccaaggggctgagcgatccagggaagatcaagcggctgcgttcccaggtgcaggtgagcttggaggactacatcaacgaccgccagtatgactcgcgtggccgctttggagagctgctgctgctgctgcccaccttgcagagcatcacctggcagatgatcgagcagatccagttcatcaagctcttcggcatggccaagattgacaacctgttgcaggagatgctgctgggagggtcccccagcgatgcaccccatgcccaccaccccctgcaccctcacctgatgcaggaacatatgggaaccaacgtcatcgttgccaacacaatgcccactcacctcagcaacggacagatgtgtgagtggccccgacccaggggacaggcagccacccctgagaccccacagccctcaccgccaggtggctcagggtctgagccctataagctcctgccgggagccgtcgccacaatcgtcaagcccctctctgccatcccccagccgaccatcaccaagcaggaagttatctagcaagccgctggggcttgggggctccactggctccccccagccccctaagagagcacctggtgatcacgtggtcacggcaaaggaagacgtgatgccaggaccagtcccagagcaggaatgggaaggatgaagggcccgagaacatggcctaagggccacatcccactgccacccttgacgccctgctctggataacaagactttgacttggggagacctctactgccttggacaacttttctcatgttgaagccactgccttcaccttcaccttcatccatgtccaacccccgacttcatcccaaaggacagccgcctggagatgacttgaggccttacttaaacccagctcccttcttccctagcctggtgcttctcctctcctagcccctgtcatggtgtccagacagagccctgtgaggctgggtccaattgtggcacttggggcaccttgctcctccttctgctgctgcccccacctctgctgcctccctctgctgtcaccttgctcagccatcccgtcttctccaacaccacctctccagaggccaaggaggccttggaaacgattcccccagtcattctgggaacatgttgtaagcactgactgggaccaggcaccaggcagggtctagaaggctgtggtgagggaagacgcctttctcctccaacccaacctcatcctccttcttcagggacttgggtgggtacttgggtgaggatccctgaaggccttcaacccgagaaaacaaacccaggttggcgactgcaacaggaacttggagtggagaggaaaagcatcagaaagaggcagaccatccaccaggcctttgagaaagggtagaattctggctggtagagcaggtgagatgggacattccaaagaacagcctgagccaaggcctagtggtagtaagaatctagcaagaattgaggaagaatggtgtgggagagggatgatgaagagagagagggcctgctggagagcatagggtctggaacaccaggctgaggtcctgatcagcttcaaggagtatgcagggagctgggcttccagaaaatgaacacagcagttctgcagaggacgggaggctggaagctgggaggtcaggtggggtggatgatataatgcgggtgagagtaatgaggcttggggctggagaggacaagatgggtaaaccctcacatcagagtgacatccaggaggaataagctcccagggcctgtctcaagctcttccttactcccaggcactgtcttaaggcatctgacatgcatcatctcatttaatcctcccttcctccctattaacctagagattgtttttgttttttattctcctcctccctccccgccctcacccgccccactccctcctaacctagagattgttacagaagctgaaattgcgttctaagaggtgaagtgattttttttctgaaactcacacaactaggaagtggctgagtcaggacttgaacccaggtctccctggatcagaacaggagctcttaactacagtggctgaatagcttctccaaaggctccctgtgttctcaccgtgatcaagttgaggggcttccggctcccttctacagcctcagaaaccagactcgttcttctgggaaccctgcccactcccaggaccaagattggcctgaggctgcactaaaattcacttagggtcgagcatcctgtttgctgataaatattaaggagaa

SEQ ID NO: 227 - DNA, 1470 bp, Homo sapiens
cactcaccgccttcctggtggacgggctcctggtggctgtgctgctgctgtgagcgggcccctgctcctccatgcccccagctctccggctgggtgggcttggccatggtcagcgtgaacgcgcccctcggggctccagtggagagttcttacgacacgtccccatcagaaggcaccaacctcaacgcgcccaacagcctgggtgtcagcgccctgtgtgccatctgcggggaccgggccacgggcaaacactacggtgcctcgagctgtgacggctgcaagggcttcttccggaggagcgtgcggaagaaccacatgtactcctgcagatttagccggcagtgcgtggtggacaaagacaagaggaaccagtgccgctactgcaggctcaagaaatgcttccgggctggcatgaagaaggaagccgtccagaatgagcgggaccggatcagcactcgaaggtcaagctatgaggacagcagcctgccctccatcaatgcgctcctgcaggcggaggtcctgtcccgacagatcacctcccccgtctccgggatcaacggcgacattcgggcgaagaagattgccagcatcgcagatgtgtgtgagtccatgaaggagcagctgctggttctcgttgagtgggccaagtacatcccagctttctgcgagctccccctggacgaccaggtggccctgctcagagcccatgctggcgagcacctgctgctcggagccaccaagagatccatggtgttcaaggacgtgctgctcctaggcaatgactacattgtccctcggcactgcccggagctggcggagatgagccgggtgtccatacgcatccttgacgagctggtgctgcccttccaggagctgcagatcgatgacaatgagtatgcctacctcaaagccatcatcttctttgacccagatgccaaggggctgagcgatccagggaagatcaagcggctgcgttcccaggtgcaggtgagcttggaggactacatcaacgaccgccagtatgactcgcgtggccgctttggagagctgctgctgctgctgcccaccttgcagagcatcacctggcagatgatcgagcagatccagttcatcaagctcttcggcatggccaagattgacaacctgttgcaggagatgctgctgggagggtcccccagcgatgcaccccatgcccaccaccccctgcaccctcacctgatgcaggaacatatgggaaccaacgtcatcgttgccaacacaatgcccactcacctcagcaacggacagatgtgtgagtggccccgacccaggggacaggcagccacccctgagaccccacagccctcaccgccaggtggctcagggtctgagccctataagctcctgccgggagccgtcgccacaatcgtcaagcccctctctgccatcccccagccgaccatcaccaagcaggaagttatctagcaagcc

SEQ ID NO: 228 - DNA, 3329 bp, Homo sapiens
gggaggaggcagtgggagggcggagggcgggggccttcggggtgggcgcccagggtagggcaggtggccgcggcgtggaggcagggagaatgcgactctccaaaaccctcgtcgacatggacatggccgactacagtgctgcactggacccagcctacaccaccctggaatttgagaatgtgcaggtgttgacgatgggcaatgttttgttgccgctgcgtctcgccagattgaggcatcccctccgacatcactggagcatatctggaggggtggacagttctccacagggagacacgtccccatcagaaggcaccaacctcaacgcgcccaacagcctgggtgtcagcgccctgtgtgccatctgcggggaccgggccacgggcaaacactacggtgcctcgagctgtgacggctgcaagggcttcttccggaggagcgtgcggaagaaccacatgtactcctgcagatttagccggcagtgcgtggtggacaaagacaagaggaaccagtgccgctactgcaggctcaagaaatgcttccgggctggcatgaagaaggaagccgtccagaatgagcgggaccggatcagcactcgaaggtcaagctatgaggacagcagcctgccctccatcaatgcgctcctgcaggcggaggtcctgtcccgacagatcacctcccccgtctccgggatcaacggcgacattcgggcgaagaagattgccagcatcgcagatgtgtgtgagtccatgaaggagcagctgctggttctcgttgagtgggccaagtacatcccagctttctgcgagctccccctggacgaccaggtggccctgctcagagcccatgctggcgagcacctgctgctcggagccaccaagagatccatggtgttcaaggacgtgctgctcctaggcaatgactacattgtccctcggcactgcccggagctggcggagatgagccgggtgtccatacgcatccttgacgagctggtgctgcccttccaggagctgcagatcgatgacaatgagtatgcctacctcaaagccatcatcttctttgacccagatgccaaggggctgagcgatccagggaagatcaagcggctgcgttcccaggtgcaggtgagcttggaggactacatcaacgaccgccagtatgactcgcgtggccgctttggagagctgctgctgctgctgcccaccttgcagagcatcacctggcagatgatcgagcagatccagttcatcaagctcttcggcatggccaagattgacaacctgttgcaggagatgctgctgggagggtcccccagcgatgcaccccatgcccaccaccccctgcaccctcacctgatgcaggaacatatgggaaccaacgtcatcgttgccaacacaatgcccactcacctcagcaacggacagatgtgtgagtggccccgacccaggggacaggcagccacccctgagaccccacagccctcaccgccaggtggctcagggtctgagccctataagctcctgccgggagccgtcgccacaatcgtcaagcccctctctgccatcccccagccgaccatcaccaagcaggaagttatctagcaagccgctggggcttgggggctccactggctccccccagccccctaagagagcacctggtgatcacgtggtcacggcaaaggaagacgtgatgccaggaccagtcccagagcaggaatgggaaggatgaagggcccgagaacatggcctaagggccacatcccactgccacccttgacgccctgctctggataacaagactttgacttggggagacctctactgccttggacaacttttctcatgttgaagccactgccttcaccttcaccttcatccatgtccaacccccgacttcatcccaaaggacagccgcctggagatgacttgaggccttacttaaacccagctcccttcttccctagcctggtgcttctcctctcctagcccctgtcatggtgtccagacagagccctgtgaggctgggtccaattgtggcacttggggcaccttgctcctccttctgctgctgcccccacctctgctgcctccctctgctgtcaccttgctcagccatcccgtcttctccaacaccacctctccagaggccaaggaggccttggaaacgattcccccagtcattctgggaacatgttgtaagcactgactgggaccaggcaccaggcagggtctagaaggctgtggtgagggaagacgcctttctcctccaacccaacctcatcctccttcttcagggacttgggtgggtacttgggtgaggatccctgaaggccttcaacccgagaaaacaaacccaggttggcgactgcaacaggaacttggagtggagaggaaaagcatcagaaagaggcagaccatccaccaggcctttgagaaagggtagaattctggctggtagagcaggtgagatgggacattccaaagaacagcctgagccaaggcctagtggtagtaagaatctagcaagaattgaggaagaatggtgtgggagagggatgatgaagagagagagggcctgctggagagcatagggtctggaacaccaggctgaggtcctgatcagcttcaaggagtatgcagggagctgggcttccagaaaatgaacacagcagttctgcagaggacgggaggctggaagctgggaggtcaggtggggtggatgatataatgcgggtgagagtaatgaggcttggggctggagaggacaagatgggtaaaccctcacatcagagtgacatccaggaggaataagctcccagggcctgtctcaagctcttccttactcccaggcactgtcttaaggcatctgacatgcatcatctcatttaatcctcccttcctccctattaacctagagattgtttttgttttttattctcctcctccctccccgccctcacccgccccactccctcctaacctagagattgttacagaagctgaaattgcgttctaagaggtgaagtgattttttttctgaaactcacacaactaggaagtggctgagtcaggacttgaacccaggtctccctggatcagaacaggagctcttaactacagtggctgaatagcttctccaaaggctccctgtgttctcaccgtgatcaagttgaggggcttccggctcccttctacagcctcagaaaccagactcgttcttctgggaaccctgcccactcccaggaccaagattggcctgaggctgcactaaaattcacttagggtcgagcatcctgtttgctgataaatattaaggagaattca

SEQ ID NO: 229 - DNA, 1339 bp, Homo sapiens
ggccatggtcagcgtgaacgcgcccctcggggctccagtggagagttcttacgacacgtccccatcagaaggcaccaacctcaacgcgcccaacagcctgggtgtcagcgccctgtgtgccatctgcggggaccgggccacgggcaaacactacggtgcctcgagctgtgacggctgcaagggcttcttccggaggagcgtgcggaagaaccacatgtactcctgcagatttagccggcagtgcgtggtggacaaagacaagaggaaccagtgccgctactgcaggctcaagaaatgcttccgggctggcatgaagaaggaagccgtccagaatgagcgggaccggatcagcactcgaaggtcaagctatgaggacagcagcctgccctccatcaatgcgctcctgcaggcggaggtcctgtcccgacagatcacctcccccgtctccgggatcaacggcgacattcgggcgaagaagattgccagcatcgcagatgtgtgtgagtccatgaaggagcagctgctggttctcgttgagtgggccaagtacatcccagctttctgcgagctccccctggacgaccaggtggccctgctcagagcccatgctggcgagcacctgctgctcggagccaccaagagatccatggtgttcaaggacgtgctgctcctaggcaatgactacattgtccctcggcactgcccggagctggcggagatgagccgggtgtccatacgcatccttgacgagctggtgctgcccttccaggagctgcagatcgatgacaatgagtatgcctacctcaaagccatcatcttctttgacccagatgccaaggggctgagcgatccagggaagatcaagcggctgcgttcccaggtgcaggtgagcttggaggactacatcaacgaccgccagtatgactcgcgtggccgctttggagagctgctgctgctgctgcccaccttgcagagcatcacctggcagatgatcgagcagatccagttcatcaagctcttcggcatggccaagattgacaacctgttgcaggagatgctgctgggagggtcccccagcgatgcaccccatgcccaccaccccctgcaccctcacctgatgcaggaacatatgggaaccaacgtcatcgttgccaacacaatgcccactcacctcagcaacggacagatgtccacccctgagaccccacagccctcaccgccaggtggctcagggtctgagccctataagctcctgccgggagccgtcgccacaatcgtcaagcccctctctgccatcccccagccgaccatcaccaagcaggaagttatctagcaagcc

SEQ ID NO: 230 - DNA, 3209 bp, Homo sapiens
gggaggaggcagtgggagggcggagggcgggggccttcggggtgggcgcccagggtagggcaggtggccgcggcgtggaggcagggagaatgcgactctccaaaaccctcgtcgacatggacatggccgactacagtgctgcactggacccagcctacaccaccctggaatttgagaatgtgcaggtgttgacgatgggcaatgacacgtccccatcagaaggcaccaacctcaacgcgcccaacagcctgggtgtcagcgccctgtgtgccatctgcggggaccgggccacgggcaaacactacggtgcctcgagctgtgacggctgcaagggcttcttccggaggagcgtgcggaagaaccacatgtactcctgcagatttagccggcagtgcgtggtggacaaagacaagaggaaccagtgccgctactgcaggctcaagaaatgcttccgggctggcatgaagaaggaagccgtccagaatgagcgggaccggatcagcactcgaaggtcaagctatgaggacagcagcctgccctccatcaatgcgctcctgcaggcggaggtcctgtcccgacagatcacctcccccgtctccgggatcaacggcgacattcgggcgaagaagattgccagcatcgcagatgtgtgtgagtccatgaaggagcagctgctggttctcgttgagtgggccaagtacatcccagctttctgcgagctccccctggacgaccaggtggccctgctcagagcccatgctggcgagcacctgctgctcggagccaccaagagatccatggtgttcaaggacgtgctgctcctaggcaatgactacattgtccctcggcactgcccggagctggcggagatgagccgggtgtccatacgcatccttgacgagctggtgctgcccttccaggagctgcagatcgatgacaatgagtatgcctacctcaaagccatcatcttctttgacccagatgccaaggggctgagcgatccagggaagatcaagcggctgcgttcccaggtgcaggtgagcttggaggactacatcaacgaccgccagtatgactcgcgtggccgctttggagagctgctgctgctgctgcccaccttgcagagcatcacctggcagatgatcgagcagatccagttcatcaagctcttcggcatggccaagattgacaacctgttgcaggagatgctgctgggagggtcccccagcgatgcaccccatgcccaccaccccctgcaccctcacctgatgcaggaacatatgggaaccaacgtcatcgttgccaacacaatgcccactcacctcagcaacggacagatgtccacccctgagaccccacagccctcaccgccaggtggctcagggtctgagccctataagctcctgccgggagccgtcgccacaatcgtcaagcccctctctgccatcccccagccgaccatcaccaagcaggaagttatctagcaagccgctggggcttgggggctccactggctccccccagccccctaagagagcacctggtgatcacgtggtcacggcaaaggaagacgtgatgccaggaccagtcccagagcaggaatgggaaggatgaagggcccgagaacatggcctaagggccacatcccactgccacccttgacgccctgctctggataacaagactttgacttggggagacctctactgccttggacaacttttctcatgttgaagccactgccttcaccttcaccttcatccatgtccaacccccgacttcatcccaaaggacagccgcctggagatgacttgaggccttacttaaacccagctcccttcttccctagcctggtgcttctcctctcctagcccctgtcatggtgtccagacagagccctgtgaggctgggtccaattgtggcacttggggcaccttgctcctccttctgctgctgcccccacctctgctgcctccctctgctgtcaccttgctcagccatcccgtcttctccaacaccacctctccagaggccaaggaggccttggaaacgattcccccagtcattctgggaacatgttgtaagcactgactgggaccaggcaccaggcagggtctagaaggctgtggtgagggaagacgcctttctcctccaacccaacctcatcctccttcttcagggacttgggtgggtacttgggtgaggatccctgaaggccttcaacccgagaaaacaaacccaggttggcgactgcaacaggaacttggagtggagaggaaaagcatcagaaagaggcagaccatccaccaggcctttgagaaagggtagaattctggctggtagagcaggtgagatgggacattccaaagaacagcctgagccaaggcctagtggtagtaagaatctagcaagaattgaggaagaatggtgtgggagagggatgatgaagagagagagggcctgctggagagcatagggtctggaacaccaggctgaggtcctgatcagcttcaaggagtatgcagggagctgggcttccagaaaatgaacacagcagttctgcagaggacgggaggctggaagctgggaggtcaggtggggtggatgatataatgcgggtgagagtaatgaggcttggggctggagaggacaagatgggtaaaccctcacatcagagtgacatccaggaggaataagctcccagggcctgtctcaagctcttccttactcccaggcactgtcttaaggcatctgacatgcatcatctcatttaatcctcccttcctccctattaacctagagattgtttttgttttttattctcctcctccctccccgccctcacccgccccactccctcctaacctagagattgttacagaagctgaaattgcgttctaagaggtgaagtgattttttttctgaaactcacacaactaggaagtggctgagtcaggacttgaacccaggtctccctggatcagaacaggagctcttaactacagtggctgaatagcttctccaaaggctccctgtgttctcaccgtgatcaagttgaggggcttccggctcccttctacagcctcagaaaccagactcgttcttctgggaaccctgcccactcccaggaccaagattggcctgaggctgcactaaaattcacttagggtcgagcatcctgtttgctgataaatattaaggagaattca

SEQ ID NO: 231 - DNA, 3930 bp, Homo sapiens
cttccaccccgccccctcctccagcctccatccctccctcattctatctcttcctctccgtcgccctcgctcctcgctggatgcttctttctgggttttcttttttttttcccttctgtcctccctccccgcgagtttcgggcgctggcttagagggttcccgctttctcaagggaaggggagctgccgagaccgcgctccgctccccagccgggccggatgcctcactgagcccagttccaccaggtgagaagagtgatgaccatccttttccttactatggttatttcatactttggttgcatgaaggctgcccccatgaaagaagcaaacatccgaggacaaggtggcttggcctacccaggtgtgcggacccatgggactctggagagcgtgaatgggcccaaggcaggttcaagaggcttgacatcattggctgacactttcgaacacgtgatagaagagctgttggatgaggaccagaaagttcggcccaatgaagaaaacaataaggacgcagacttgtacacgtccagggtgatgctcagtagtcaagtgcctttggagcctcctcttctctttctgctggaggaatacaaaaattacctagatgctgcaaacatgtccatgagggtccggcgccactctgaccctgcccgccgaggggagctgagcgtgtgtgacagtattagtgagtgggtaacggcagcagacaaaaagactgcagtggacatgtcgggcgggacggtcacagtccttgaaaaggtccctgtatcaaaaggccaactgaagcaatacttctacgagaccaagtgcaatcccatgggttacacaaaagaaggctgcaggggcatagacaaaaggcattggaactcccagtgccgaactacccagtcgtacgtgcgggcccttaccatggatagcaaaaagagaattggctggcgattcataaggatagacacttcttgtgtatgtacattgaccattaaaaggggaagatagtggatttatgttgtatagattagattatattgagacaaaaattatctatttgtatatatacataacagggtaaattattcagttaagaaaaaaataattttatgaactgcatgtataaatgaagtttatacagtacagtggttctacaatctatttattggacatgtccatgaccagaagggaaacagtcatttgcgcacaacttaaaaagtctgcattacattccttgataatgttgtggtttgttgccgttgccaagaactgaaaacataaaaagttaaaaaaaataataaattgcatgctgctttaattgtgaattgataataaactgtcctctttcagaaaacagaaaaaaaacacacacacacacaacaaaaatttgaaccaaaacattccgtttacattttagacagtaagtatcttcgttcttgttagtactatatctgttttactgcttttaacttctgatagcgttggaattaaaacaatgtcaaggtgctgttgtcattgctttactggcttaggggatgggggatggggggtatatttttgtttgttttgtgtttttttttcgtttgtttgttttgttttttagttcccacagggagtagagatggggaaagaattcctacaatatatattctggctgataaaagatacatttgtatgttgtgaagatgtttgcaatatcgatcagatgactagaaagtgaataaaaattaaggcaactgaacaaaaaaatgctcacactccacatcccgtgatgcacctcccaggccccgctcattctttgggcgttggtcagagtaagctgcttttgacggaaggacctatgtttgctcagaacacattctttccccccctccccctctggtctcctctttgttttgttttaaggaagaaaaatcagttgcgcgttctgaaatattttaccactgctgtgaacaagtgaacacattgtgtcacatcatgacactcgtataagcatggagaacagtgatttttttttagaacagaaaacaacaaaaaataaccccaaaatgaagattattttttatgaggagtgaacatttgggtaaatcatggctaagcttaaaaaaaactcatggtgaggcttaacaatgtcttgtaagcaaaaggtagagccctgtatcaacccagaaacacctagatcagaacaggaatccacattgccagtgacatgagactgaacagccaaatggaggctatgtggagttggcattgcatttaccggcagtgcgggaggaatttctgagtggccatcccaaggtctaggtggaggtggggcatggtatttgagacattccaaaacgaaggcctctgaaggacccttcagaggtggctctggaatgacatgtgtcaagctgcttggacctcgtgctttaagtgcctacattatctaactgtgctcaagaggttctcgactggaggaccacactcaagccgacttatgcccaccatcccacctctggataattttgcataaaattggattagcctggagcaggttgggagccaaatgtggcatttgtgatcatgagattgatgcaatgagatagaagatgtttgctacctgaacacttattgctttgaaactagacttgaggaaaccagggtttatcttttgagaacttttggtaagggaaaagggaacaggaaaagaaaccccaaactcaggccgaatgatcaaggggacccataggaaatcttgtccagagacaagacttcgggaaggtgtctggacattcagaacaccaagacttgaaggtgccttgctcaatggaagaggccaggacagagctgacaaaattttgctccccagtgaaggccacagcaaccttctgcccatcctgtctgttcatggagagggtccctgcctcacctctgccattttgggttaggagaagtcaagttgggagcctgaaatagtggttcttggaaaaatggatccccagtgaaaactagagctctaagcccattcagcccatttcacacctgaaaatgttagtgatcaccacttggaccagcatccttaagtatcagaaagccccaagcaattgctgcatcttagtagggtgagggataagcaaaagaggatgttcaccataacccaggaatgaagataccatcagcaaagaatttcaatttgttcagtctttcatttagagctagtctttcacagtaccatctgaatacctctttgaaagaaggaagactttacgtagtgtagatttgttttgtgttgtttgaaaatattatctttgtaattatttttaatatgtaaggaatgcttggaatatctgctgtatgtcaactttatgcagcttccttttgagggacaaatttaaaacaaacaaccccccatcacaaacttaaaggattgcaagggccagatctgttaagtggtttcataggagacacatccagcaattgtgtggtcagtggctcttttacccaataagatacatcacagtcacatgcttgatggtttatgttgacctaagatttattttgttaaaatctctctctgttgtgttcgttcttgttctgttttgttttgttttttaaagtcttgctgtggtctctttgtggcagaagtgtttcatgcatggcagcaggcctgttgcttttttatggcgattcccattgaaaatgtaagtaaatgtctgtggccttgttctctctatggtaaagatattattcaccatgtaaaacaaaaaacaatatttattgtattttagtatatttatataattatgttattgaaaaaaattggcattaaaacttaaccgcatcagaagcctattgtaaatacaagttctatttaagtgtactaattaacatataatatatgttttaaatatagaatttttaatgtttttaaatatattttcaaagtacataaaa

SEQ ID NO: 232 - DNA, 3829 bp, Homo sapiens
aatatcaagtatcacttaattagagatttttaagccttttcctcctgctgtgccgggtgtgtaatccgggcgataggagtccattcagcaccttggacagagccaacggatttgtccgaggtggcggtacccccagttccaccaggtgagaagagtgatgaccatccttttccttactatggttatttcatactttggttgcatgaaggctgcccccatgaaagaagcaaacatccgaggacaaggtggcttggcctacccaggtgtgcggacccatgggactctggagagcgtgaatgggcccaaggcaggttcaagaggcttgacatcattggctgacactttcgaacacgtgatagaagagctgttggatgaggaccagaaagttcggcccaatgaagaaaacaataaggacgcagacttgtacacgtccagggtgatgctcagtagtcaagtgcctttggagcctcctcttctctttctgctggaggaatacaaaaattacctagatgctgcaaacatgtccatgagggtccggcgccactctgaccctgcccgccgaggggagctgagcgtgtgtgacagtattagtgagtgggtaacggcagcagacaaaaagactgcagtggacatgtcgggcgggacggtcacagtccttgaaaaggtccctgtatcaaaaggccaactgaagcaatacttctacgagaccaagtgcaatcccatgggttacacaaaagaaggctgcaggggcatagacaaaaggcattggaactcccagtgccgaactacccagtcgtacgtgcgggcccttaccatggatagcaaaaagagaattggctggcgattcataaggatagacacttcttgtgtatgtacattgaccattaaaaggggaagatagtggatttatgttgtatagattagattatattgagacaaaaattatctatttgtatatatacataacagggtaaattattcagttaagaaaaaaataattttatgaactgcatgtataaatgaagtttatacagtacagtggttctacaatctatttattggacatgtccatgaccagaagggaaacagtcatttgcgcacaacttaaaaagtctgcattacattccttgataatgttgtggtttgttgccgttgccaagaactgaaaacataaaaagttaaaaaaaataataaattgcatgctgctttaattgtgaattgataataaactgtcctctttcagaaaacagaaaaaaaacacacacacacacaacaaaaatttgaaccaaaacattccgtttacattttagacagtaagtatcttcgttcttgttagtactatatctgttttactgcttttaacttctgatagcgttggaattaaaacaatgtcaaggtgctgttgtcattgctttactggcttaggggatgggggatggggggtatatttttgtttgttttgtgtttttttttcgtttgtttgttttgttttttagttcccacagggagtagagatggggaaagaattcctacaatatatattctggctgataaaagatacatttgtatgttgtgaagatgtttgcaatatcgatcagatgactagaaagtgaataaaaattaaggcaactgaacaaaaaaatgctcacactccacatcccgtgatgcacctcccaggccccgctcattctttgggcgttggtcagagtaagctgcttttgacggaaggacctatgtttgctcagaacacattctttccccccctccccctctggtctcctctttgttttgttttaaggaagaaaaatcagttgcgcgttctgaaatattttaccactgctgtgaacaagtgaacacattgtgtcacatcatgacactcgtataagcatggagaacagtgatttttttttagaacagaaaacaacaaaaaataaccccaaaatgaagattattttttatgaggagtgaacatttgggtaaatcatggctaagcttaaaaaaaactcatggtgaggcttaacaatgtcttgtaagcaaaaggtagagccctgtatcaacccagaaacacctagatcagaacaggaatccacattgccagtgacatgagactgaacagccaaatggaggctatgtggagttggcattgcatttaccggcagtgcgggaggaatttctgagtggccatcccaaggtctaggtggaggtggggcatggtatttgagacattccaaaacgaaggcctctgaaggacccttcagaggtggctctggaatgacatgtgtcaagctgcttggacctcgtgctttaagtgcctacattatctaactgtgctcaagaggttctcgactggaggaccacactcaagccgacttatgcccaccatcccacctctggataattttgcataaaattggattagcctggagcaggttgggagccaaatgtggcatttgtgatcatgagattgatgcaatgagatagaagatgtttgctacctgaacacttattgctttgaaactagacttgaggaaaccagggtttatcttttgagaacttttggtaagggaaaagggaacaggaaaagaaaccccaaactcaggccgaatgatcaaggggacccataggaaatcttgtccagagacaagacttcgggaaggtgtctggacattcagaacaccaagacttgaaggtgccttgctcaatggaagaggccaggacagagctgacaaaattttgctccccagtgaaggccacagcaaccttctgcccatcctgtctgttcatggagagggtccctgcctcacctctgccattttgggttaggagaagtcaagttgggagcctgaaatagtggttcttggaaaaatggatccccagtgaaaactagagctctaagcccattcagcccatttcacacctgaaaatgttagtgatcaccacttggaccagcatccttaagtatcagaaagccccaagcaattgctgcatcttagtagggtgagggataagcaaaagaggatgttcaccataacccaggaatgaagataccatcagcaaagaatttcaatttgttcagtctttcatttagagctagtctttcacagtaccatctgaatacctctttgaaagaaggaagactttacgtagtgtagatttgttttgtgttgtttgaaaatattatctttgtaattatttttaatatgtaaggaatgcttggaatatctgctgtatgtcaactttatgcagcttccttttgagggacaaatttaaaacaaacaaccccccatcacaaacttaaaggattgcaagggccagatctgttaagtggtttcataggagacacatccagcaattgtgtggtcagtggctcttttacccaataagatacatcacagtcacatgcttgatggtttatgttgacctaagatttattttgttaaaatctctctctgttgtgttcgttcttgttctgttttgttttgttttttaaagtcttgctgtggtctctttgtggcagaagtgtttcatgcatggcagcaggcctgttgcttttttatggcgattcccattgaaaatgtaagtaaatgtctgtggccttgttctctctatggtaaagatattattcaccatgtaaaacaaaaaacaatatttattgtattttagtatatttatataattatgttattgaaaaaaattggcattaaaacttaaccgcatcagaagcctattgtaaatacaagttctatttaagtgtactaattaacatataatatatgttttaaatatagaatttttaatgtttttaaatatattttcaaagtacataaaa

SEQ ID NO: 233 - DNA, 4059 bp, Homo sapiens
gtaaaccaatagcccccatgctctgtgcgatttcattgtgtgctcgcgttcgcaagctccgtagtgcaggaaggtgcgggaagttaagtaattaaaagaaattatagagtgggatgcaaaaataacccgaaggacaactggatgtgtggagccaccagttttctccatgagtgcacaaggttaatccttgttactactcagaatgctgagtttctacagaaagggttgcaggtccacacatgttttggcgtctacccacacgcttctgtatggcatgactgtgcatcccagaagaagggctgtgctgtgtacctccacgtttcagtggaatttaacaaactgatccctgaaaatggtttcataaagttccaccaggtgagaagagtgatgaccatccttttccttactatggttatttcatactttggttgcatgaaggctgcccccatgaaagaagcaaacatccgaggacaaggtggcttggcctacccaggtgtgcggacccatgggactctggagagcgtgaatgggcccaaggcaggttcaagaggcttgacatcattggctgacactttcgaacacgtgatagaagagctgttggatgaggaccagaaagttcggcccaatgaagaaaacaataaggacgcagacttgtacacgtccagggtgatgctcagtagtcaagtgcctttggagcctcctcttctctttctgctggaggaatacaaaaattacctagatgctgcaaacatgtccatgagggtccggcgccactctgaccctgcccgccgaggggagctgagcgtgtgtgacagtattagtgagtgggtaacggcagcagacaaaaagactgcagtggacatgtcgggcgggacggtcacagtccttgaaaaggtccctgtatcaaaaggccaactgaagcaatacttctacgagaccaagtgcaatcccatgggttacacaaaagaaggctgcaggggcatagacaaaaggcattggaactcccagtgccgaactacccagtcgtacgtgcgggcccttaccatggatagcaaaaagagaattggctggcgattcataaggatagacacttcttgtgtatgtacattgaccattaaaaggggaagatagtggatttatgttgtatagattagattatattgagacaaaaattatctatttgtatatatacataacagggtaaattattcagttaagaaaaaaataattttatgaactgcatgtataaatgaagtttatacagtacagtggttctacaatctatttattggacatgtccatgaccagaagggaaacagtcatttgcgcacaacttaaaaagtctgcattacattccttgataatgttgtggtttgttgccgttgccaagaactgaaaacataaaaagttaaaaaaaataataaattgcatgctgctttaattgtgaattgataataaactgtcctctttcagaaaacagaaaaaaaacacacacacacacaacaaaaatttgaaccaaaacattccgtttacattttagacagtaagtatcttcgttcttgttagtactatatctgttttactgcttttaacttctgatagcgttggaattaaaacaatgtcaaggtgctgttgtcattgctttactggcttaggggatgggggatggggggtatatttttgtttgttttgtgtttttttttcgtttgtttgttttgttttttagttcccacagggagtagagatggggaaagaattcctacaatatatattctggctgataaaagatacatttgtatgttgtgaagatgtttgcaatatcgatcagatgactagaaagtgaataaaaattaaggcaactgaacaaaaaaatgctcacactccacatcccgtgatgcacctcccaggccccgctcattctttgggcgttggtcagagtaagctgcttttgacggaaggacctatgtttgctcagaacacattctttccccccctccccctctggtctcctctttgttttgttttaaggaagaaaaatcagttgcgcgttctgaaatattttaccactgctgtgaacaagtgaacacattgtgtcacatcatgacactcgtataagcatggagaacagtgatttttttttagaacagaaaacaacaaaaaataaccccaaaatgaagattattttttatgaggagtgaacatttgggtaaatcatggctaagcttaaaaaaaactcatggtgaggcttaacaatgtcttgtaagcaaaaggtagagccctgtatcaacccagaaacacctagatcagaacaggaatccacattgccagtgacatgagactgaacagccaaatggaggctatgtggagttggcattgcatttaccggcagtgcgggaggaatttctgagtggccatcccaaggtctaggtggaggtggggcatggtatttgagacattccaaaacgaaggcctctgaaggacccttcagaggtggctctggaatgacatgtgtcaagctgcttggacctcgtgctttaagtgcctacattatctaactgtgctcaagaggttctcgactggaggaccacactcaagccgacttatgcccaccatcccacctctggataattttgcataaaattggattagcctggagcaggttgggagccaaatgtggcatttgtgatcatgagattgatgcaatgagatagaagatgtttgctacctgaacacttattgctttgaaactagacttgaggaaaccagggtttatcttttgagaacttttggtaagggaaaagggaacaggaaaagaaaccccaaactcaggccgaatgatcaaggggacccataggaaatcttgtccagagacaagacttcgggaaggtgtctggacattcagaacaccaagacttgaaggtgccttgctcaatggaagaggccaggacagagctgacaaaattttgctccccagtgaaggccacagcaaccttctgcccatcctgtctgttcatggagagggtccctgcctcacctctgccattttgggttaggagaagtcaagttgggagcctgaaatagtggttcttggaaaaatggatccccagtgaaaactagagctctaagcccattcagcccatttcacacctgaaaatgttagtgatcaccacttggaccagcatccttaagtatcagaaagccccaagcaattgctgcatcttagtagggtgagggataagcaaaagaggatgttcaccataacccaggaatgaagataccatcagcaaagaatttcaatttgttcagtctttcatttagagctagtctttcacagtaccatctgaatacctctttgaaagaaggaagactttacgtagtgtagatttgttttgtgttgtttgaaaatattatctttgtaattatttttaatatgtaaggaatgcttggaatatctgctgtatgtcaactttatgcagcttccttttgagggacaaatttaaaacaaacaaccccccatcacaaacttaaaggattgcaagggccagatctgttaagtggtttcataggagacacatccagcaattgtgtggtcagtggctcttttacccaataagatacatcacagtcacatgcttgatggtttatgttgacctaagatttattttgttaaaatctctctctgttgtgttcgttcttgttctgttttgttttgttttttaaagtcttgctgtggtctctttgtggcagaagtgtttcatgcatggcagcaggcctgttgcttttttatggcgattcccattgaaaatgtaagtaaatgtctgtggccttgttctctctatggtaaagatattattcaccatgtaaaacaaaaaacaatatttattgtattttagtatatttatataattatgttattgaaaaaaattggcattaaaacttaaccgcatcagaagcctattgtaaatacaagttctatttaagtgtactaattaacatataatatatgttttaaatatagaatttttaatgtttttaaatatattttcaaagtacataaaa

SEQ ID NO: 234 - DNA, 4766 bp, Homo sapiens
gcgcgcgcgcacacacacacacacacacagagagaacatctctagtaaaaagaaaagttgagctttcttagctagatgtgtgtattagccagaaaaagccaaggagtgaagggttttagagaactggaggagataaagtggagtctgcatatgggaggcatttgaaatggacttaaatgtctttttaatgctgactttttcagttttctccttaccagacacattgttttcatgacattagccccaggcatagacacatcattaaaatgaacatgtcaaaaaatgatttctgtttagaaataagcaaaacattttcagttgtgaccacccaggtgtagaataaagaacagtggaattgggagccctgagttctaacataaactttcttcatgacataaggcaagtcttctatggcctttggtttccttacctgtaaaacaggatggctcaatgaaattatctttcttctttgctataatagagtatctctgtgggaagaggaaaaaaaaagtcaatttaaaggctccttatagttccccaactgctgttttattgtgctattcatgcctagacatcacatagctagaaaggcccatcagacccctcaggccactgctgttcctgtcacacattcctgcaaaggaccatgttgctaacttgaaaaaaattactattaattacacttgcagttgttgcttagtaacatttatgattttgtgtttctcgtgacagcatgagcagagatcattaaaaattaaacttacaaagctgctaaagtgggaagaaggagaacttgaagccacaatttttgcacttgcttagaagccatctaatctcaggtttatatgctagatcttgggggaaacactgcatgtctctggtttatattaaaccacatacagcacactactgacactgatttgtgtctggtgcagctggagtttatcaccaagacataaaaaaaccttgaccctgcagaatggcctggaattacaatcagatgggccacatggcatcccggtgaaagaaagccctaaccagttttctgtcttgtttctgctttctccctacagttccaccaggtgagaagagtgatgaccatccttttccttactatggttatttcatactttggttgcatgaaggctgcccccatgaaagaagcaaacatccgaggacaaggtggcttggcctacccaggtgtgcggacccatgggactctggagagcgtgaatgggcccaaggcaggttcaagaggcttgacatcattggctgacactttcgaacacgtgatagaagagctgttggatgaggaccagaaagttcggcccaatgaagaaaacaataaggacgcagacttgtacacgtccagggtgatgctcagtagtcaagtgcctttggagcctcctcttctctttctgctggaggaatacaaaaattacctagatgctgcaaacatgtccatgagggtccggcgccactctgaccctgcccgccgaggggagctgagcgtgtgtgacagtattagtgagtgggtaacggcagcagacaaaaagactgcagtggacatgtcgggcgggacggtcacagtccttgaaaaggtccctgtatcaaaaggccaactgaagcaatacttctacgagaccaagtgcaatcccatgggttacacaaaagaaggctgcaggggcatagacaaaaggcattggaactcccagtgccgaactacccagtcgtacgtgcgggcccttaccatggatagcaaaaagagaattggctggcgattcataaggatagacacttcttgtgtatgtacattgaccattaaaaggggaagatagtggatttatgttgtatagattagattatattgagacaaaaattatctatttgtatatatacataacagggtaaattattcagttaagaaaaaaataattttatgaactgcatgtataaatgaagtttatacagtacagtggttctacaatctatttattggacatgtccatgaccagaagggaaacagtcatttgcgcacaacttaaaaagtctgcattacattccttgataatgttgtggtttgttgccgttgccaagaactgaaaacataaaaagttaaaaaaaataataaattgcatgctgctttaattgtgaattgataataaactgtcctctttcagaaaacagaaaaaaaacacacacacacacaacaaaaatttgaaccaaaacattccgtttacattttagacagtaagtatcttcgttcttgttagtactatatctgttttactgcttttaacttctgatagcgttggaattaaaacaatgtcaaggtgctgttgtcattgctttactggcttaggggatgggggatggggggtatatttttgtttgttttgtgtttttttttcgtttgtttgttttgttttttagttcccacagggagtagagatggggaaagaattcctacaatatatattctggctgataaaagatacatttgtatgttgtgaagatgtttgcaatatcgatcagatgactagaaagtgaataaaaattaaggcaactgaacaaaaaaatgctcacactccacatcccgtgatgcacctcccaggccccgctcattctttgggcgttggtcagagtaagctgcttttgacggaaggacctatgtttgctcagaacacattctttccccccctccccctctggtctcctctttgttttgttttaaggaagaaaaatcagttgcgcgttctgaaatattttaccactgctgtgaacaagtgaacacattgtgtcacatcatgacactcgtataagcatggagaacagtgatttttttttagaacagaaaacaacaaaaaataaccccaaaatgaagattattttttatgaggagtgaacatttgggtaaatcatggctaagcttaaaaaaaactcatggtgaggcttaacaatgtcttgtaagcaaaaggtagagccctgtatcaacccagaaacacctagatcagaacaggaatccacattgccagtgacatgagactgaacagccaaatggaggctatgtggagttggcattgcatttaccggcagtgcgggaggaatttctgagtggccatcccaaggtctaggtggaggtggggcatggtatttgagacattccaaaacgaaggcctctgaaggacccttcagaggtggctctggaatgacatgtgtcaagctgcttggacctcgtgctttaagtgcctacattatctaactgtgctcaagaggttctcgactggaggaccacactcaagccgacttatgcccaccatcccacctctggataattttgcataaaattggattagcctggagcaggttgggagccaaatgtggcatttgtgatcatgagattgatgcaatgagatagaagatgtttgctacctgaacacttattgctttgaaactagacttgaggaaaccagggtttatcttttgagaacttttggtaagggaaaagggaacaggaaaagaaaccccaaactcaggccgaatgatcaaggggacccataggaaatcttgtccagagacaagacttcgggaaggtgtctggacattcagaacaccaagacttgaaggtgccttgctcaatggaagaggccaggacagagctgacaaaattttgctccccagtgaaggccacagcaaccttctgcccatcctgtctgttcatggagagggtccctgcctcacctctgccattttgggttaggagaagtcaagttgggagcctgaaatagtggttcttggaaaaatggatccccagtgaaaactagagctctaagcccattcagcccatttcacacctgaaaatgttagtgatcaccacttggaccagcatccttaagtatcagaaagccccaagcaattgctgcatcttagtagggtgagggataagcaaaagaggatgttcaccataacccaggaatgaagataccatcagcaaagaatttcaatttgttcagtctttcatttagagctagtctttcacagtaccatctgaatacctctttgaaagaaggaagactttacgtagtgtagatttgttttgtgttgtttgaaaatattatctttgtaattatttttaatatgtaaggaatgcttggaatatctgctgtatgtcaactttatgcagcttccttttgagggacaaatttaaaacaaacaaccccccatcacaaacttaaaggattgcaagggccagatctgttaagtggtttcataggagacacatccagcaattgtgtggtcagtggctcttttacccaataagatacatcacagtcacatgcttgatggtttatgttgacctaagatttattttgttaaaatctctctctgttgtgttcgttcttgttctgttttgttttgttttttaaagtcttgctgtggtctctttgtggcagaagtgtttcatgcatggcagcaggcctgttgcttttttatggcgattcccattgaaaatgtaagtaaatgtctgtggccttgttctctctatggtaaagatattattcaccatgtaaaacaaaaaacaatatttattgtattttagtatatttatataattatgttattgaaaaaaattggcattaaaacttaaccgcatcagaagcctattgtaaatacaagttctatttaagtgtactaattaacatataatatatgttttaaatatagaatttttaatgtttttaaatatattttcaaagtacataaaa

SEQ ID NO: 235 - DNA, 4000 bp, Homo sapiens
agagctaaataatgtctgacccgggcgcaaggcgcagcctggagctccgggtccccgacgctgccgccgccgcgcccgggcgcacccgcccgctcgctgtcccgcgcaccccgtagcgcctcgggctcccgggccggacagaggagccagcccggtgcgcccctccacctcctgctcggggggctttaatgagacacccaccgctgctgtggggccggcggggagcagcaccgcgacggggaccggggctgggcgctggagccagaatcggaaccacgatgtgactccgccgccggggacccgtgagttccaccaggtgagaagagtgatgaccatccttttccttactatggttatttcatactttggttgcatgaaggctgcccccatgaaagaagcaaacatccgaggacaaggtggcttggcctacccaggtgtgcggacccatgggactctggagagcgtgaatgggcccaaggcaggttcaagaggcttgacatcattggctgacactttcgaacacgtgatagaagagctgttggatgaggaccagaaagttcggcccaatgaagaaaacaataaggacgcagacttgtacacgtccagggtgatgctcagtagtcaagtgcctttggagcctcctcttctctttctgctggaggaatacaaaaattacctagatgctgcaaacatgtccatgagggtccggcgccactctgaccctgcccgccgaggggagctgagcgtgtgtgacagtattagtgagtgggtaacggcagcagacaaaaagactgcagtggacatgtcgggcgggacggtcacagtccttgaaaaggtccctgtatcaaaaggccaactgaagcaatacttctacgagaccaagtgcaatcccatgggttacacaaaagaaggctgcaggggcatagacaaaaggcattggaactcccagtgccgaactacccagtcgtacgtgcgggcccttaccatggatagcaaaaagagaattggctggcgattcataaggatagacacttcttgtgtatgtacattgaccattaaaaggggaagatagtggatttatgttgtatagattagattatattgagacaaaaattatctatttgtatatatacataacagggtaaattattcagttaagaaaaaaataattttatgaactgcatgtataaatgaagtttatacagtacagtggttctacaatctatttattggacatgtccatgaccagaagggaaacagtcatttgcgcacaacttaaaaagtctgcattacattccttgataatgttgtggtttgttgccgttgccaagaactgaaaacataaaaagttaaaaaaaataataaattgcatgctgctttaattgtgaattgataataaactgtcctctttcagaaaacagaaaaaaaacacacacacacacaacaaaaatttgaaccaaaacattccgtttacattttagacagtaagtatcttcgttcttgttagtactatatctgttttactgcttttaacttctgatagcgttggaattaaaacaatgtcaaggtgctgttgtcattgctttactggcttaggggatgggggatggggggtatatttttgtttgttttgtgtttttttttcgtttgtttgttttgttttttagttcccacagggagtagagatggggaaagaattcctacaatatatattctggctgataaaagatacatttgtatgttgtgaagatgtttgcaatatcgatcagatgactagaaagtgaataaaaattaaggcaactgaacaaaaaaatgctcacactccacatcccgtgatgcacctcccaggccccgctcattctttgggcgttggtcagagtaagctgcttttgacggaaggacctatgtttgctcagaacacattctttccccccctccccctctggtctcctctttgttttgttttaaggaagaaaaatcagttgcgcgttctgaaatattttaccactgctgtgaacaagtgaacacattgtgtcacatcatgacactcgtataagcatggagaacagtgatttttttttagaacagaaaacaacaaaaaataaccccaaaatgaagattattttttatgaggagtgaacatttgggtaaatcatggctaagcttaaaaaaaactcatggtgaggcttaacaatgtcttgtaagcaaaaggtagagccctgtatcaacccagaaacacctagatcagaacaggaatccacattgccagtgacatgagactgaacagccaaatggaggctatgtggagttggcattgcatttaccggcagtgcgggaggaatttctgagtggccatcccaaggtctaggtggaggtggggcatggtatttgagacattccaaaacgaaggcctctgaaggacccttcagaggtggctctggaatgacatgtgtcaagctgcttggacctcgtgctttaagtgcctacattatctaactgtgctcaagaggttctcgactggaggaccacactcaagccgacttatgcccaccatcccacctctggataattttgcataaaattggattagcctggagcaggttgggagccaaatgtggcatttgtgatcatgagattgatgcaatgagatagaagatgtttgctacctgaacacttattgctttgaaactagacttgaggaaaccagggtttatcttttgagaacttttggtaagggaaaagggaacaggaaaagaaaccccaaactcaggccgaatgatcaaggggacccataggaaatcttgtccagagacaagacttcgggaaggtgtctggacattcagaacaccaagacttgaaggtgccttgctcaatggaagaggccaggacagagctgacaaaattttgctccccagtgaaggccacagcaaccttctgcccatcctgtctgttcatggagagggtccctgcctcacctctgccattttgggttaggagaagtcaagttgggagcctgaaatagtggttcttggaaaaatggatccccagtgaaaactagagctctaagcccattcagcccatttcacacctgaaaatgttagtgatcaccacttggaccagcatccttaagtatcagaaagccccaagcaattgctgcatcttagtagggtgagggataagcaaaagaggatgttcaccataacccaggaatgaagataccatcagcaaagaatttcaatttgttcagtctttcatttagagctagtctttcacagtaccatctgaatacctctttgaaagaaggaagactttacgtagtgtagatttgttttgtgttgtttgaaaatattatctttgtaattatttttaatatgtaaggaatgcttggaatatctgctgtatgtcaactttatgcagcttccttttgagggacaaatttaaaacaaacaaccccccatcacaaacttaaaggattgcaagggccagatctgttaagtggtttcataggagacacatccagcaattgtgtggtcagtggctcttttacccaataagatacatcacagtcacatgcttgatggtttatgttgacctaagatttattttgttaaaatctctctctgttgtgttcgttcttgttctgttttgttttgttttttaaagtcttgctgtggtctctttgtggcagaagtgtttcatgcatggcagcaggcctgttgcttttttatggcgattcccattgaaaatgtaagtaaatgtctgtggccttgttctctctatggtaaagatattattcaccatgtaaaacaaaaaacaatatttattgtattttagtatatttatataattatgttattgaaaaaaattggcattaaaacttaaccgcatcagaagcctattgtaaatacaagttctatttaagtgtactaattaacatataatatatgttttaaatatagaatttttaatgtttttaaatatattttcaaagtacataaaa

SEQ ID NO: 236 - DNA, 3878 bp, Homo sapiens
acacggctacctgctccccaggaattgagactgaagtggacttacaagtccgaagccaatgtagcttggaaaacttgggaggcggaattcctaccgctgggaactgaaagggtctgcgacactctcgggcaggccgaacccacatctctacccatcctgcgcccctcttctgaagcgccctccagttccaccaggtgagaagagtgatgaccatccttttccttactatggttatttcatactttggttgcatgaaggctgcccccatgaaagaagcaaacatccgaggacaaggtggcttggcctacccaggtgtgcggacccatgggactctggagagcgtgaatgggcccaaggcaggttcaagaggcttgacatcattggctgacactttcgaacacgtgatagaagagctgttggatgaggaccagaaagttcggcccaatgaagaaaacaataaggacgcagacttgtacacgtccagggtgatgctcagtagtcaagtgcctttggagcctcctcttctctttctgctggaggaatacaaaaattacctagatgctgcaaacatgtccatgagggtccggcgccactctgaccctgcccgccgaggggagctgagcgtgtgtgacagtattagtgagtgggtaacggcagcagacaaaaagactgcagtggacatgtcgggcgggacggtcacagtccttgaaaaggtccctgtatcaaaaggccaactgaagcaatacttctacgagaccaagtgcaatcccatgggttacacaaaagaaggctgcaggggcatagacaaaaggcattggaactcccagtgccgaactacccagtcgtacgtgcgggcccttaccatggatagcaaaaagagaattggctggcgattcataaggatagacacttcttgtgtatgtacattgaccattaaaaggggaagatagtggatttatgttgtatagattagattatattgagacaaaaattatctatttgtatatatacataacagggtaaattattcagttaagaaaaaaataattttatgaactgcatgtataaatgaagtttatacagtacagtggttctacaatctatttattggacatgtccatgaccagaagggaaacagtcatttgcgcacaacttaaaaagtctgcattacattccttgataatgttgtggtttgttgccgttgccaagaactgaaaacataaaaagttaaaaaaaataataaattgcatgctgctttaattgtgaattgataataaactgtcctctttcagaaaacagaaaaaaaacacacacacacacaacaaaaatttgaaccaaaacattccgtttacattttagacagtaagtatcttcgttcttgttagtactatatctgttttactgcttttaacttctgatagcgttggaattaaaacaatgtcaaggtgctgttgtcattgctttactggcttaggggatgggggatggggggtatatttttgtttgttttgtgtttttttttcgtttgtttgttttgttttttagttcccacagggagtagagatggggaaagaattcctacaatatatattctggctgataaaagatacatttgtatgttgtgaagatgtttgcaatatcgatcagatgactagaaagtgaataaaaattaaggcaactgaacaaaaaaatgctcacactccacatcccgtgatgcacctcccaggccccgctcattctttgggcgttggtcagagtaagctgcttttgacggaaggacctatgtttgctcagaacacattctttccccccctccccctctggtctcctctttgttttgttttaaggaagaaaaatcagttgcgcgttctgaaatattttaccactgctgtgaacaagtgaacacattgtgtcacatcatgacactcgtataagcatggagaacagtgatttttttttagaacagaaaacaacaaaaaataaccccaaaatgaagattattttttatgaggagtgaacatttgggtaaatcatggctaagcttaaaaaaaactcatggtgaggcttaacaatgtcttgtaagcaaaaggtagagccctgtatcaacccagaaacacctagatcagaacaggaatccacattgccagtgacatgagactgaacagccaaatggaggctatgtggagttggcattgcatttaccggcagtgcgggaggaatttctgagtggccatcccaaggtctaggtggaggtggggcatggtatttgagacattccaaaacgaaggcctctgaaggacccttcagaggtggctctggaatgacatgtgtcaagctgcttggacctcgtgctttaagtgcctacattatctaactgtgctcaagaggttctcgactggaggaccacactcaagccgacttatgcccaccatcccacctctggataattttgcataaaattggattagcctggagcaggttgggagccaaatgtggcatttgtgatcatgagattgatgcaatgagatagaagatgtttgctacctgaacacttattgctttgaaactagacttgaggaaaccagggtttatcttttgagaacttttggtaagggaaaagggaacaggaaaagaaaccccaaactcaggccgaatgatcaaggggacccataggaaatcttgtccagagacaagacttcgggaaggtgtctggacattcagaacaccaagacttgaaggtgccttgctcaatggaagaggccaggacagagctgacaaaattttgctccccagtgaaggccacagcaaccttctgcccatcctgtctgttcatggagagggtccctgcctcacctctgccattttgggttaggagaagtcaagttgggagcctgaaatagtggttcttggaaaaatggatccccagtgaaaactagagctctaagcccattcagcccatttcacacctgaaaatgttagtgatcaccacttggaccagcatccttaagtatcagaaagccccaagcaattgctgcatcttagtagggtgagggataagcaaaagaggatgttcaccataacccaggaatgaagataccatcagcaaagaatttcaatttgttcagtctttcatttagagctagtctttcacagtaccatctgaatacctctttgaaagaaggaagactttacgtagtgtagatttgttttgtgttgtttgaaaatattatctttgtaattatttttaatatgtaaggaatgcttggaatatctgctgtatgtcaactttatgcagcttccttttgagggacaaatttaaaacaaacaaccccccatcacaaacttaaaggattgcaagggccagatctgttaagtggtttcataggagacacatccagcaattgtgtggtcagtggctcttttacccaataagatacatcacagtcacatgcttgatggtttatgttgacctaagatttattttgttaaaatctctctctgttgtgttcgttcttgttctgttttgttttgttttttaaagtcttgctgtggtctctttgtggcagaagtgtttcatgcatggcagcaggcctgttgcttttttatggcgattcccattgaaaatgtaagtaaatgtctgtggccttgttctctctatggtaaagatattattcaccatgtaaaacaaaaaacaatatttattgtattttagtatatttatataattatgttattgaaaaaaattggcattaaaacttaaccgcatcagaagcctattgtaaatacaagttctatttaagtgtactaattaacatataatatatgttttaaatatagaatttttaatgtttttaaatatattttcaaagtacataaaa

SEQ ID NO: 237 - DNA, 4532 bp, Homo sapiens
gcgcgcgcgcacacacacacacacacacagagagaacatctctagtaaaaagaaaagttgagctttcttagctagatgtgtgtattagccagaaaaagccaaggagtgaagggttttagagaactggaggagataaagtggagtctgcatatgggaggcatttgaaatggacttaaatgtctttttaatgctgactttttcagttttctccttaccagacacattgttttcatgacattagccccaggcatagacacatcattaaaatgaacatgtcaaaaaatgatttctgtttagaaataagcaaaacattttcagttgtgaccacccaggtgtagaataaagaacagtggaattgggagccctgagttctaacataaactttcttcatgacataaggcaagtcttctatggcctttggtttccttacctgtaaaacaggatggctcaatgaaattatctttcttctttgctataatagagtatctctgtgggaagaggaaaaaaaaagtcaatttaaaggctccttatagttccccaactgctgttttattgtgctattcatgcctagacatcacatagctagaaaggcccatcagacccctcaggccactgctgttcctgtcacacattcctgcaaaggaccatgttgctaacttgaaaaaaattactattaattacacttgcagttgttgcttagtaacatttatgattttgtgtttctcgtgacagcatgagcagagatcattaaaaattaaacttacaaagctgctaaagtgggaagaaggagaacttgaagccacaatttttgcacttgcttagaagccatctaatctcagttccaccaggtgagaagagtgatgaccatccttttccttactatggttatttcatactttggttgcatgaaggctgcccccatgaaagaagcaaacatccgaggacaaggtggcttggcctacccaggtgtgcggacccatgggactctggagagcgtgaatgggcccaaggcaggttcaagaggcttgacatcattggctgacactttcgaacacgtgatagaagagctgttggatgaggaccagaaagttcggcccaatgaagaaaacaataaggacgcagacttgtacacgtccagggtgatgctcagtagtcaagtgcctttggagcctcctcttctctttctgctggaggaatacaaaaattacctagatgctgcaaacatgtccatgagggtccggcgccactctgaccctgcccgccgaggggagctgagcgtgtgtgacagtattagtgagtgggtaacggcagcagacaaaaagactgcagtggacatgtcgggcgggacggtcacagtccttgaaaaggtccctgtatcaaaaggccaactgaagcaatacttctacgagaccaagtgcaatcccatgggttacacaaaagaaggctgcaggggcatagacaaaaggcattggaactcccagtgccgaactacccagtcgtacgtgcgggcccttaccatggatagcaaaaagagaattggctggcgattcataaggatagacacttcttgtgtatgtacattgaccattaaaaggggaagatagtggatttatgttgtatagattagattatattgagacaaaaattatctatttgtatatatacataacagggtaaattattcagttaagaaaaaaataattttatgaactgcatgtataaatgaagtttatacagtacagtggttctacaatctatttattggacatgtccatgaccagaagggaaacagtcatttgcgcacaacttaaaaagtctgcattacattccttgataatgttgtggtttgttgccgttgccaagaactgaaaacataaaaagttaaaaaaaataataaattgcatgctgctttaattgtgaattgataataaactgtcctctttcagaaaacagaaaaaaaacacacacacacacaacaaaaatttgaaccaaaacattccgtttacattttagacagtaagtatcttcgttcttgttagtactatatctgttttactgcttttaacttctgatagcgttggaattaaaacaatgtcaaggtgctgttgtcattgctttactggcttaggggatgggggatggggggtatatttttgtttgttttgtgtttttttttcgtttgtttgttttgttttttagttcccacagggagtagagatggggaaagaattcctacaatatatattctggctgataaaagatacatttgtatgttgtgaagatgtttgcaatatcgatcagatgactagaaagtgaataaaaattaaggcaactgaacaaaaaaatgctcacactccacatcccgtgatgcacctcccaggccccgctcattctttgggcgttggtcagagtaagctgcttttgacggaaggacctatgtttgctcagaacacattctttccccccctccccctctggtctcctctttgttttgttttaaggaagaaaaatcagttgcgcgttctgaaatattttaccactgctgtgaacaagtgaacacattgtgtcacatcatgacactcgtataagcatggagaacagtgatttttttttagaacagaaaacaacaaaaaataaccccaaaatgaagattattttttatgaggagtgaacatttgggtaaatcatggctaagcttaaaaaaaactcatggtgaggcttaacaatgtcttgtaagcaaaaggtagagccctgtatcaacccagaaacacctagatcagaacaggaatccacattgccagtgacatgagactgaacagccaaatggaggctatgtggagttggcattgcatttaccggcagtgcgggaggaatttctgagtggccatcccaaggtctaggtggaggtggggcatggtatttgagacattccaaaacgaaggcctctgaaggacccttcagaggtggctctggaatgacatgtgtcaagctgcttggacctcgtgctttaagtgcctacattatctaactgtgctcaagaggttctcgactggaggaccacactcaagccgacttatgcccaccatcccacctctggataattttgcataaaattggattagcctggagcaggttgggagccaaatgtggcatttgtgatcatgagattgatgcaatgagatagaagatgtttgctacctgaacacttattgctttgaaactagacttgaggaaaccagggtttatcttttgagaacttttggtaagggaaaagggaacaggaaaagaaaccccaaactcaggccgaatgatcaaggggacccataggaaatcttgtccagagacaagacttcgggaaggtgtctggacattcagaacaccaagacttgaaggtgccttgctcaatggaagaggccaggacagagctgacaaaattttgctccccagtgaaggccacagcaaccttctgcccatcctgtctgttcatggagagggtccctgcctcacctctgccattttgggttaggagaagtcaagttgggagcctgaaatagtggttcttggaaaaatggatccccagtgaaaactagagctctaagcccattcagcccatttcacacctgaaaatgttagtgatcaccacttggaccagcatccttaagtatcagaaagccccaagcaattgctgcatcttagtagggtgagggataagcaaaagaggatgttcaccataacccaggaatgaagataccatcagcaaagaatttcaatttgttcagtctttcatttagagctagtctttcacagtaccatctgaatacctctttgaaagaaggaagactttacgtagtgtagatttgttttgtgttgtttgaaaatattatctttgtaattatttttaatatgtaaggaatgcttggaatatctgctgtatgtcaactttatgcagcttccttttgagggacaaatttaaaacaaacaaccccccatcacaaacttaaaggattgcaagggccagatctgttaagtggtttcataggagacacatccagcaattgtgtggtcagtggctcttttacccaataagatacatcacagtcacatgcttgatggtttatgttgacctaagatttattttgttaaaatctctctctgttgtgttcgttcttgttctgttttgttttgttttttaaagtcttgctgtggtctctttgtggcagaagtgtttcatgcatggcagcaggcctgttgcttttttatggcgattcccattgaaaatgtaagtaaatgtctgtggccttgttctctctatggtaaagatattattcaccatgtaaaacaaaaaacaatatttattgtattttagtatatttatataattatgttattgaaaaaaattggcattaaaacttaaccgcatcagaagcctattgtaaatacaagttctatttaagtgtactaattaacatataatatatgttttaaatatagaatttttaatgtttttaaatatattttcaaagtacataaaa

SEQ ID NO: 238 - DNA, 4030 bp, Homo sapiens
acccactttcccattcaccgcggagagggctgctctcgctgccgctccccccggcgaactagcatgaaatctccctgcctctgccgagatcaaatggagcttctcgctgatggggtgcgagtattacctccgccatgcaatttccactatcaataatttaacttctttgctgcagaacagaaggagtacataccgggcaccaaagactcgcgccccctcccccctttaattaagcgaagggaacgtgaaaaaataatagagtgtgggagttttggggccgaagtctttcccggagcagctgccttgatggttactttgacaagtagtgactgaaaagttccaccaggtgagaagagtgatgaccatccttttccttactatggttatttcatactttggttgcatgaaggctgcccccatgaaagaagcaaacatccgaggacaaggtggcttggcctacccaggtgtgcggacccatgggactctggagagcgtgaatgggcccaaggcaggttcaagaggcttgacatcattggctgacactttcgaacacgtgatagaagagctgttggatgaggaccagaaagttcggcccaatgaagaaaacaataaggacgcagacttgtacacgtccagggtgatgctcagtagtcaagtgcctttggagcctcctcttctctttctgctggaggaatacaaaaattacctagatgctgcaaacatgtccatgagggtccggcgccactctgaccctgcccgccgaggggagctgagcgtgtgtgacagtattagtgagtgggtaacggcagcagacaaaaagactgcagtggacatgtcgggcgggacggtcacagtccttgaaaaggtccctgtatcaaaaggccaactgaagcaatacttctacgagaccaagtgcaatcccatgggttacacaaaagaaggctgcaggggcatagacaaaaggcattggaactcccagtgccgaactacccagtcgtacgtgcgggcccttaccatggatagcaaaaagagaattggctggcgattcataaggatagacacttcttgtgtatgtacattgaccattaaaaggggaagatagtggatttatgttgtatagattagattatattgagacaaaaattatctatttgtatatatacataacagggtaaattattcagttaagaaaaaaataattttatgaactgcatgtataaatgaagtttatacagtacagtggttctacaatctatttattggacatgtccatgaccagaagggaaacagtcatttgcgcacaacttaaaaagtctgcattacattccttgataatgttgtggtttgttgccgttgccaagaactgaaaacataaaaagttaaaaaaaataataaattgcatgctgctttaattgtgaattgataataaactgtcctctttcagaaaacagaaaaaaaacacacacacacacaacaaaaatttgaaccaaaacattccgtttacattttagacagtaagtatcttcgttcttgttagtactatatctgttttactgcttttaacttctgatagcgttggaattaaaacaatgtcaaggtgctgttgtcattgctttactggcttaggggatgggggatggggggtatatttttgtttgttttgtgtttttttttcgtttgtttgttttgttttttagttcccacagggagtagagatggggaaagaattcctacaatatatattctggctgataaaagatacatttgtatgttgtgaagatgtttgcaatatcgatcagatgactagaaagtgaataaaaattaaggcaactgaacaaaaaaatgctcacactccacatcccgtgatgcacctcccaggccccgctcattctttgggcgttggtcagagtaagctgcttttgacggaaggacctatgtttgctcagaacacattctttccccccctccccctctggtctcctctttgttttgttttaaggaagaaaaatcagttgcgcgttctgaaatattttaccactgctgtgaacaagtgaacacattgtgtcacatcatgacactcgtataagcatggagaacagtgatttttttttagaacagaaaacaacaaaaaataaccccaaaatgaagattattttttatgaggagtgaacatttgggtaaatcatggctaagcttaaaaaaaactcatggtgaggcttaacaatgtcttgtaagcaaaaggtagagccctgtatcaacccagaaacacctagatcagaacaggaatccacattgccagtgacatgagactgaacagccaaatggaggctatgtggagttggcattgcatttaccggcagtgcgggaggaatttctgagtggccatcccaaggtctaggtggaggtggggcatggtatttgagacattccaaaacgaaggcctctgaaggacccttcagaggtggctctggaatgacatgtgtcaagctgcttggacctcgtgctttaagtgcctacattatctaactgtgctcaagaggttctcgactggaggaccacactcaagccgacttatgcccaccatcccacctctggataattttgcataaaattggattagcctggagcaggttgggagccaaatgtggcatttgtgatcatgagattgatgcaatgagatagaagatgtttgctacctgaacacttattgctttgaaactagacttgaggaaaccagggtttatcttttgagaacttttggtaagggaaaagggaacaggaaaagaaaccccaaactcaggccgaatgatcaaggggacccataggaaatcttgtccagagacaagacttcgggaaggtgtctggacattcagaacaccaagacttgaaggtgccttgctcaatggaagaggccaggacagagctgacaaaattttgctccccagtgaaggccacagcaaccttctgcccatcctgtctgttcatggagagggtccctgcctcacctctgccattttgggttaggagaagtcaagttgggagcctgaaatagtggttcttggaaaaatggatccccagtgaaaactagagctctaagcccattcagcccatttcacacctgaaaatgttagtgatcaccacttggaccagcatccttaagtatcagaaagccccaagcaattgctgcatcttagtagggtgagggataagcaaaagaggatgttcaccataacccaggaatgaagataccatcagcaaagaatttcaatttgttcagtctttcatttagagctagtctttcacagtaccatctgaatacctctttgaaagaaggaagactttacgtagtgtagatttgttttgtgttgtttgaaaatattatctttgtaattatttttaatatgtaaggaatgcttggaatatctgctgtatgtcaactttatgcagcttccttttgagggacaaatttaaaacaaacaaccccccatcacaaacttaaaggattgcaagggccagatctgttaagtggtttcataggagacacatccagcaattgtgtggtcagtggctcttttacccaataagatacatcacagtcacatgcttgatggtttatgttgacctaagatttattttgttaaaatctctctctgttgtgttcgttcttgttctgttttgttttgttttttaaagtcttgctgtggtctctttgtggcagaagtgtttcatgcatggcagcaggcctgttgcttttttatggcgattcccattgaaaatgtaagtaaatgtctgtggccttgttctctctatggtaaagatattattcaccatgtaaaacaaaaaacaatatttattgtattttagtatatttatataattatgttattgaaaaaaattggcattaaaacttaaccgcatcagaagcctattgtaaatacaagttctatttaagtgtactaattaacatataatatatgttttaaatatagaatttttaatgtttttaaatatattttcaaagtacataaaa

SEQ ID NO: 239 - DNA, 3776 bp, Homo sapiens
gtaaaccaatagcccccatgctctgtgcgatttcattgtgtgctcgcgttcgcaagctccgtagtgcaggaaggtgcgggaagttccaccaggtgagaagagtgatgaccatccttttccttactatggttatttcatactttggttgcatgaaggctgcccccatgaaagaagcaaacatccgaggacaaggtggcttggcctacccaggtgtgcggacccatgggactctggagagcgtgaatgggcccaaggcaggttcaagaggcttgacatcattggctgacactttcgaacacgtgatagaagagctgttggatgaggaccagaaagttcggcccaatgaagaaaacaataaggacgcagacttgtacacgtccagggtgatgctcagtagtcaagtgcctttggagcctcctcttctctttctgctggaggaatacaaaaattacctagatgctgcaaacatgtccatgagggtccggcgccactctgaccctgcccgccgaggggagctgagcgtgtgtgacagtattagtgagtgggtaacggcagcagacaaaaagactgcagtggacatgtcgggcgggacggtcacagtccttgaaaaggtccctgtatcaaaaggccaactgaagcaatacttctacgagaccaagtgcaatcccatgggttacacaaaagaaggctgcaggggcatagacaaaaggcattggaactcccagtgccgaactacccagtcgtacgtgcgggcccttaccatggatagcaaaaagagaattggctggcgattcataaggatagacacttcttgtgtatgtacattgaccattaaaaggggaagatagtggatttatgttgtatagattagattatattgagacaaaaattatctatttgtatatatacataacagggtaaattattcagttaagaaaaaaataattttatgaactgcatgtataaatgaagtttatacagtacagtggttctacaatctatttattggacatgtccatgaccagaagggaaacagtcatttgcgcacaacttaaaaagtctgcattacattccttgataatgttgtggtttgttgccgttgccaagaactgaaaacataaaaagttaaaaaaaataataaattgcatgctgctttaattgtgaattgataataaactgtcctctttcagaaaacagaaaaaaaacacacacacacacaacaaaaatttgaaccaaaacattccgtttacattttagacagtaagtatcttcgttcttgttagtactatatctgttttactgcttttaacttctgatagcgttggaattaaaacaatgtcaaggtgctgttgtcattgctttactggcttaggggatgggggatggggggtatatttttgtttgttttgtgtttttttttcgtttgtttgttttgttttttagttcccacagggagtagagatggggaaagaattcctacaatatatattctggctgataaaagatacatttgtatgttgtgaagatgtttgcaatatcgatcagatgactagaaagtgaataaaaattaaggcaactgaacaaaaaaatgctcacactccacatcccgtgatgcacctcccaggccccgctcattctttgggcgttggtcagagtaagctgcttttgacggaaggacctatgtttgctcagaacacattctttccccccctccccctctggtctcctctttgttttgttttaaggaagaaaaatcagttgcgcgttctgaaatattttaccactgctgtgaacaagtgaacacattgtgtcacatcatgacactcgtataagcatggagaacagtgatttttttttagaacagaaaacaacaaaaaataaccccaaaatgaagattattttttatgaggagtgaacatttgggtaaatcatggctaagcttaaaaaaaactcatggtgaggcttaacaatgtcttgtaagcaaaaggtagagccctgtatcaacccagaaacacctagatcagaacaggaatccacattgccagtgacatgagactgaacagccaaatggaggctatgtggagttggcattgcatttaccggcagtgcgggaggaatttctgagtggccatcccaaggtctaggtggaggtggggcatggtatttgagacattccaaaacgaaggcctctgaaggacccttcagaggtggctctggaatgacatgtgtcaagctgcttggacctcgtgctttaagtgcctacattatctaactgtgctcaagaggttctcgactggaggaccacactcaagccgacttatgcccaccatcccacctctggataattttgcataaaattggattagcctggagcaggttgggagccaaatgtggcatttgtgatcatgagattgatgcaatgagatagaagatgtttgctacctgaacacttattgctttgaaactagacttgaggaaaccagggtttatcttttgagaacttttggtaagggaaaagggaacaggaaaagaaaccccaaactcaggccgaatgatcaaggggacccataggaaatcttgtccagagacaagacttcgggaaggtgtctggacattcagaacaccaagacttgaaggtgccttgctcaatggaagaggccaggacagagctgacaaaattttgctccccagtgaaggccacagcaaccttctgcccatcctgtctgttcatggagagggtccctgcctcacctctgccattttgggttaggagaagtcaagttgggagcctgaaatagtggttcttggaaaaatggatccccagtgaaaactagagctctaagcccattcagcccatttcacacctgaaaatgttagtgatcaccacttggaccagcatccttaagtatcagaaagccccaagcaattgctgcatcttagtagggtgagggataagcaaaagaggatgttcaccataacccaggaatgaagataccatcagcaaagaatttcaatttgttcagtctttcatttagagctagtctttcacagtaccatctgaatacctctttgaaagaaggaagactttacgtagtgtagatttgttttgtgttgtttgaaaatattatctttgtaattatttttaatatgtaaggaatgcttggaatatctgctgtatgtcaactttatgcagcttccttttgagggacaaatttaaaacaaacaaccccccatcacaaacttaaaggattgcaagggccagatctgttaagtggtttcataggagacacatccagcaattgtgtggtcagtggctcttttacccaataagatacatcacagtcacatgcttgatggtttatgttgacctaagatttattttgttaaaatctctctctgttgtgttcgttcttgttctgttttgttttgttttttaaagtcttgctgtggtctctttgtggcagaagtgtttcatgcatggcagcaggcctgttgcttttttatggcgattcccattgaaaatgtaagtaaatgtctgtggccttgttctctctatggtaaagatattattcaccatgtaaaacaaaaaacaatatttattgtattttagtatatttatataattatgttattgaaaaaaattggcattaaaacttaaccgcatcagaagcctattgtaaatacaagttctatttaagtgtactaattaacatataatatatgttttaaatatagaatttttaatgtttttaaatatattttcaaagtacataaaa

SEQ ID NO: 240 - DNA, 4071 bp, Homo sapiens
gtgtgtaatccgggcgataggagtccattcagcaccttggacagagccaacggatttgtccgaggtggcggtacccccaggtagtcttcttggccccgctgtaaagccaaccctgtgtcgcccttaaaaagcgtcttttctgaggttcggctcacactgagatcggggctggagagagagtcagattttggagcggagcgtttggaaagcgagccccagtttggtcccctcattgagctcgctgaagttggcttcctagcggtgtaggctggaatagactcttggcaagctccgggttggtatactgggttaactttgggaaatgcaagtgtttatctccaggatctagccaccggggtggtgtaagccgcaaagaagttccaccaggtgagaagagtgatgaccatccttttccttactatggttatttcatactttggttgcatgaaggctgcccccatgaaagaagcaaacatccgaggacaaggtggcttggcctacccaggtgtgcggacccatgggactctggagagcgtgaatgggcccaaggcaggttcaagaggcttgacatcattggctgacactttcgaacacgtgatagaagagctgttggatgaggaccagaaagttcggcccaatgaagaaaacaataaggacgcagacttgtacacgtccagggtgatgctcagtagtcaagtgcctttggagcctcctcttctctttctgctggaggaatacaaaaattacctagatgctgcaaacatgtccatgagggtccggcgccactctgaccctgcccgccgaggggagctgagcgtgtgtgacagtattagtgagtgggtaacggcagcagacaaaaagactgcagtggacatgtcgggcgggacggtcacagtccttgaaaaggtccctgtatcaaaaggccaactgaagcaatacttctacgagaccaagtgcaatcccatgggttacacaaaagaaggctgcaggggcatagacaaaaggcattggaactcccagtgccgaactacccagtcgtacgtgcgggcccttaccatggatagcaaaaagagaattggctggcgattcataaggatagacacttcttgtgtatgtacattgaccattaaaaggggaagatagtggatttatgttgtatagattagattatattgagacaaaaattatctatttgtatatatacataacagggtaaattattcagttaagaaaaaaataattttatgaactgcatgtataaatgaagtttatacagtacagtggttctacaatctatttattggacatgtccatgaccagaagggaaacagtcatttgcgcacaacttaaaaagtctgcattacattccttgataatgttgtggtttgttgccgttgccaagaactgaaaacataaaaagttaaaaaaaataataaattgcatgctgctttaattgtgaattgataataaactgtcctctttcagaaaacagaaaaaaaacacacacacacacaacaaaaatttgaaccaaaacattccgtttacattttagacagtaagtatcttcgttcttgttagtactatatctgttttactgcttttaacttctgatagcgttggaattaaaacaatgtcaaggtgctgttgtcattgctttactggcttaggggatgggggatggggggtatatttttgtttgttttgtgtttttttttcgtttgtttgttttgttttttagttcccacagggagtagagatggggaaagaattcctacaatatatattctggctgataaaagatacatttgtatgttgtgaagatgtttgcaatatcgatcagatgactagaaagtgaataaaaattaaggcaactgaacaaaaaaatgctcacactccacatcccgtgatgcacctcccaggccccgctcattctttgggcgttggtcagagtaagctgcttttgacggaaggacctatgtttgctcagaacacattctttccccccctccccctctggtctcctctttgttttgttttaaggaagaaaaatcagttgcgcgttctgaaatattttaccactgctgtgaacaagtgaacacattgtgtcacatcatgacactcgtataagcatggagaacagtgatttttttttagaacagaaaacaacaaaaaataaccccaaaatgaagattattttttatgaggagtgaacatttgggtaaatcatggctaagcttaaaaaaaactcatggtgaggcttaacaatgtcttgtaagcaaaaggtagagccctgtatcaacccagaaacacctagatcagaacaggaatccacattgccagtgacatgagactgaacagccaaatggaggctatgtggagttggcattgcatttaccggcagtgcgggaggaatttctgagtggccatcccaaggtctaggtggaggtggggcatggtatttgagacattccaaaacgaaggcctctgaaggacccttcagaggtggctctggaatgacatgtgtcaagctgcttggacctcgtgctttaagtgcctacattatctaactgtgctcaagaggttctcgactggaggaccacactcaagccgacttatgcccaccatcccacctctggataattttgcataaaattggattagcctggagcaggttgggagccaaatgtggcatttgtgatcatgagattgatgcaatgagatagaagatgtttgctacctgaacacttattgctttgaaactagacttgaggaaaccagggtttatcttttgagaacttttggtaagggaaaagggaacaggaaaagaaaccccaaactcaggccgaatgatcaaggggacccataggaaatcttgtccagagacaagacttcgggaaggtgtctggacattcagaacaccaagacttgaaggtgccttgctcaatggaagaggccaggacagagctgacaaaattttgctccccagtgaaggccacagcaaccttctgcccatcctgtctgttcatggagagggtccctgcctcacctctgccattttgggttaggagaagtcaagttgggagcctgaaatagtggttcttggaaaaatggatccccagtgaaaactagagctctaagcccattcagcccatttcacacctgaaaatgttagtgatcaccacttggaccagcatccttaagtatcagaaagccccaagcaattgctgcatcttagtagggtgagggataagcaaaagaggatgttcaccataacccaggaatgaagataccatcagcaaagaatttcaatttgttcagtctttcatttagagctagtctttcacagtaccatctgaatacctctttgaaagaaggaagactttacgtagtgtagatttgttttgtgttgtttgaaaatattatctttgtaattatttttaatatgtaaggaatgcttggaatatctgctgtatgtcaactttatgcagcttccttttgagggacaaatttaaaacaaacaaccccccatcacaaacttaaaggattgcaagggccagatctgttaagtggtttcataggagacacatccagcaattgtgtggtcagtggctcttttacccaataagatacatcacagtcacatgcttgatggtttatgttgacctaagatttattttgttaaaatctctctctgttgtgttcgttcttgttctgttttgttttgttttttaaagtcttgctgtggtctctttgtggcagaagtgtttcatgcatggcagcaggcctgttgcttttttatggcgattcccattgaaaatgtaagtaaatgtctgtggccttgttctctctatggtaaagatattattcaccatgtaaaacaaaaaacaatatttattgtattttagtatatttatataattatgttattgaaaaaaattggcattaaaacttaaccgcatcagaagcctattgtaaatacaagttctatttaagtgtactaattaacatataatatatgttttaaatatagaatttttaatgtttttaaatatattttcaaagtacataaaa

SEQ ID NO: 241 - DNA, 3979 bp, Homo sapiens
acacggctacctgctccccaggaattgagactgaagtggacttacaagtccgaagccaatgtagcttggaaaacttgggaggcggaattcctaccgctgggaactgaaagggtctgcgacactctcgggcaggccgaacccacatctctacccatcctgcgcccctcttctgaagcgccctccagggaagttaagagttttgactttcggggagtggttgggatgtacgtgggggattcttgactcgggttagtctctggggatgcagagccgggaagaggaatggttccaccaggtgagaagagtgatgaccatccttttccttactatggttatttcatactttggttgcatgaaggctgcccccatgaaagaagcaaacatccgaggacaaggtggcttggcctacccaggtgtgcggacccatgggactctggagagcgtgaatgggcccaaggcaggttcaagaggcttgacatcattggctgacactttcgaacacgtgatagaagagctgttggatgaggaccagaaagttcggcccaatgaagaaaacaataaggacgcagacttgtacacgtccagggtgatgctcagtagtcaagtgcctttggagcctcctcttctctttctgctggaggaatacaaaaattacctagatgctgcaaacatgtccatgagggtccggcgccactctgaccctgcccgccgaggggagctgagcgtgtgtgacagtattagtgagtgggtaacggcagcagacaaaaagactgcagtggacatgtcgggcgggacggtcacagtccttgaaaaggtccctgtatcaaaaggccaactgaagcaatacttctacgagaccaagtgcaatcccatgggttacacaaaagaaggctgcaggggcatagacaaaaggcattggaactcccagtgccgaactacccagtcgtacgtgcgggcccttaccatggatagcaaaaagagaattggctggcgattcataaggatagacacttcttgtgtatgtacattgaccattaaaaggggaagatagtggatttatgttgtatagattagattatattgagacaaaaattatctatttgtatatatacataacagggtaaattattcagttaagaaaaaaataattttatgaactgcatgtataaatgaagtttatacagtacagtggttctacaatctatttattggacatgtccatgaccagaagggaaacagtcatttgcgcacaacttaaaaagtctgcattacattccttgataatgttgtggtttgttgccgttgccaagaactgaaaacataaaaagttaaaaaaaataataaattgcatgctgctttaattgtgaattgataataaactgtcctctttcagaaaacagaaaaaaaacacacacacacacaacaaaaatttgaaccaaaacattccgtttacattttagacagtaagtatcttcgttcttgttagtactatatctgttttactgcttttaacttctgatagcgttggaattaaaacaatgtcaaggtgctgttgtcattgctttactggcttaggggatgggggatggggggtatatttttgtttgttttgtgtttttttttcgtttgtttgttttgttttttagttcccacagggagtagagatggggaaagaattcctacaatatatattctggctgataaaagatacatttgtatgttgtgaagatgtttgcaatatcgatcagatgactagaaagtgaataaaaattaaggcaactgaacaaaaaaatgctcacactccacatcccgtgatgcacctcccaggccccgctcattctttgggcgttggtcagagtaagctgcttttgacggaaggacctatgtttgctcagaacacattctttccccccctccccctctggtctcctctttgttttgttttaaggaagaaaaatcagttgcgcgttctgaaatattttaccactgctgtgaacaagtgaacacattgtgtcacatcatgacactcgtataagcatggagaacagtgatttttttttagaacagaaaacaacaaaaaataaccccaaaatgaagattattttttatgaggagtgaacatttgggtaaatcatggctaagcttaaaaaaaactcatggtgaggcttaacaatgtcttgtaagcaaaaggtagagccctgtatcaacccagaaacacctagatcagaacaggaatccacattgccagtgacatgagactgaacagccaaatggaggctatgtggagttggcattgcatttaccggcagtgcgggaggaatttctgagtggccatcccaaggtctaggtggaggtggggcatggtatttgagacattccaaaacgaaggcctctgaaggacccttcagaggtggctctggaatgacatgtgtcaagctgcttggacctcgtgctttaagtgcctacattatctaactgtgctcaagaggttctcgactggaggaccacactcaagccgacttatgcccaccatcccacctctggataattttgcataaaattggattagcctggagcaggttgggagccaaatgtggcatttgtgatcatgagattgatgcaatgagatagaagatgtttgctacctgaacacttattgctttgaaactagacttgaggaaaccagggtttatcttttgagaacttttggtaagggaaaagggaacaggaaaagaaaccccaaactcaggccgaatgatcaaggggacccataggaaatcttgtccagagacaagacttcgggaaggtgtctggacattcagaacaccaagacttgaaggtgccttgctcaatggaagaggccaggacagagctgacaaaattttgctccccagtgaaggccacagcaaccttctgcccatcctgtctgttcatggagagggtccctgcctcacctctgccattttgggttaggagaagtcaagttgggagcctgaaatagtggttcttggaaaaatggatccccagtgaaaactagagctctaagcccattcagcccatttcacacctgaaaatgttagtgatcaccacttggaccagcatccttaagtatcagaaagccccaagcaattgctgcatcttagtagggtgagggataagcaaaagaggatgttcaccataacccaggaatgaagataccatcagcaaagaatttcaatttgttcagtctttcatttagagctagtctttcacagtaccatctgaatacctctttgaaagaaggaagactttacgtagtgtagatttgttttgtgttgtttgaaaatattatctttgtaattatttttaatatgtaaggaatgcttggaatatctgctgtatgtcaactttatgcagcttccttttgagggacaaatttaaaacaaacaaccccccatcacaaacttaaaggattgcaagggccagatctgttaagtggtttcataggagacacatccagcaattgtgtggtcagtggctcttttacccaataagatacatcacagtcacatgcttgatggtttatgttgacctaagatttattttgttaaaatctctctctgttgtgttcgttcttgttctgttttgttttgttttttaaagtcttgctgtggtctctttgtggcagaagtgtttcatgcatggcagcaggcctgttgcttttttatggcgattcccattgaaaatgtaagtaaatgtctgtggccttgttctctctatggtaaagatattattcaccatgtaaaacaaaaaacaatatttattgtattttagtatatttatataattatgttattgaaaaaaattggcattaaaacttaaccgcatcagaagcctattgtaaatacaagttctatttaagtgtactaattaacatataatatatgttttaaatatagaatttttaatgtttttaaatatattttcaaagtacataaaa

SEQ ID NO: 242 - DNA, 3988 bp, Homo sapiens
gtgtgtaatccgggcgataggagtccattcagcaccttggacagagccaacggatttgtccgaggtggcggtacccccaggtagtcttcttggccccgctgtaaagccaaccctgtgtcgcccttaaaaagcgtcttttctgaggttcggctcacactgagatcggggctggagagagagtcagattttggagcggagcgtttggaaagcgagccccagtttggtcccctcattgagctcgctgaagttggcttcctagcggtgtaggctggaatagactcttggcaagctccggttccaccaggtgagaagagtgatgaccatccttttccttactatggttatttcatactttggttgcatgaaggctgcccccatgaaagaagcaaacatccgaggacaaggtggcttggcctacccaggtgtgcggacccatgggactctggagagcgtgaatgggcccaaggcaggttcaagaggcttgacatcattggctgacactttcgaacacgtgatagaagagctgttggatgaggaccagaaagttcggcccaatgaagaaaacaataaggacgcagacttgtacacgtccagggtgatgctcagtagtcaagtgcctttggagcctcctcttctctttctgctggaggaatacaaaaattacctagatgctgcaaacatgtccatgagggtccggcgccactctgaccctgcccgccgaggggagctgagcgtgtgtgacagtattagtgagtgggtaacggcagcagacaaaaagactgcagtggacatgtcgggcgggacggtcacagtccttgaaaaggtccctgtatcaaaaggccaactgaagcaatacttctacgagaccaagtgcaatcccatgggttacacaaaagaaggctgcaggggcatagacaaaaggcattggaactcccagtgccgaactacccagtcgtacgtgcgggcccttaccatggatagcaaaaagagaattggctggcgattcataaggatagacacttcttgtgtatgtacattgaccattaaaaggggaagatagtggatttatgttgtatagattagattatattgagacaaaaattatctatttgtatatatacataacagggtaaattattcagttaagaaaaaaataattttatgaactgcatgtataaatgaagtttatacagtacagtggttctacaatctatttattggacatgtccatgaccagaagggaaacagtcatttgcgcacaacttaaaaagtctgcattacattccttgataatgttgtggtttgttgccgttgccaagaactgaaaacataaaaagttaaaaaaaataataaattgcatgctgctttaattgtgaattgataataaactgtcctctttcagaaaacagaaaaaaaacacacacacacacaacaaaaatttgaaccaaaacattccgtttacattttagacagtaagtatcttcgttcttgttagtactatatctgttttactgcttttaacttctgatagcgttggaattaaaacaatgtcaaggtgctgttgtcattgctttactggcttaggggatgggggatggggggtatatttttgtttgttttgtgtttttttttcgtttgtttgttttgttttttagttcccacagggagtagagatggggaaagaattcctacaatatatattctggctgataaaagatacatttgtatgttgtgaagatgtttgcaatatcgatcagatgactagaaagtgaataaaaattaaggcaactgaacaaaaaaatgctcacactccacatcccgtgatgcacctcccaggccccgctcattctttgggcgttggtcagagtaagctgcttttgacggaaggacctatgtttgctcagaacacattctttccccccctccccctctggtctcctctttgttttgttttaaggaagaaaaatcagttgcgcgttctgaaatattttaccactgctgtgaacaagtgaacacattgtgtcacatcatgacactcgtataagcatggagaacagtgatttttttttagaacagaaaacaacaaaaaataaccccaaaatgaagattattttttatgaggagtgaacatttgggtaaatcatggctaagcttaaaaaaaactcatggtgaggcttaacaatgtcttgtaagcaaaaggtagagccctgtatcaacccagaaacacctagatcagaacaggaatccacattgccagtgacatgagactgaacagccaaatggaggctatgtggagttggcattgcatttaccggcagtgcgggaggaatttctgagtggccatcccaaggtctaggtggaggtggggcatggtatttgagacattccaaaacgaaggcctctgaaggacccttcagaggtggctctggaatgacatgtgtcaagctgcttggacctcgtgctttaagtgcctacattatctaactgtgctcaagaggttctcgactggaggaccacactcaagccgacttatgcccaccatcccacctctggataattttgcataaaattggattagcctggagcaggttgggagccaaatgtggcatttgtgatcatgagattgatgcaatgagatagaagatgtttgctacctgaacacttattgctttgaaactagacttgaggaaaccagggtttatcttttgagaacttttggtaagggaaaagggaacaggaaaagaaaccccaaactcaggccgaatgatcaaggggacccataggaaatcttgtccagagacaagacttcgggaaggtgtctggacattcagaacaccaagacttgaaggtgccttgctcaatggaagaggccaggacagagctgacaaaattttgctccccagtgaaggccacagcaaccttctgcccatcctgtctgttcatggagagggtccctgcctcacctctgccattttgggttaggagaagtcaagttgggagcctgaaatagtggttcttggaaaaatggatccccagtgaaaactagagctctaagcccattcagcccatttcacacctgaaaatgttagtgatcaccacttggaccagcatccttaagtatcagaaagccccaagcaattgctgcatcttagtagggtgagggataagcaaaagaggatgttcaccataacccaggaatgaagataccatcagcaaagaatttcaatttgttcagtctttcatttagagctagtctttcacagtaccatctgaatacctctttgaaagaaggaagactttacgtagtgtagatttgttttgtgttgtttgaaaatattatctttgtaattatttttaatatgtaaggaatgcttggaatatctgctgtatgtcaactttatgcagcttccttttgagggacaaatttaaaacaaacaaccccccatcacaaacttaaaggattgcaagggccagatctgttaagtggtttcataggagacacatccagcaattgtgtggtcagtggctcttttacccaataagatacatcacagtcacatgcttgatggtttatgttgacctaagatttattttgttaaaatctctctctgttgtgttcgttcttgttctgttttgttttgttttttaaagtcttgctgtggtctctttgtggcagaagtgtttcatgcatggcagcaggcctgttgcttttttatggcgattcccattgaaaatgtaagtaaatgtctgtggccttgttctctctatggtaaagatattattcaccatgtaaaacaaaaaacaatatttattgtattttagtatatttatataattatgttattgaaaaaaattggcattaaaacttaaccgcatcagaagcctattgtaaatacaagttctatttaagtgtactaattaacatataatatatgttttaaatatagaatttttaatgtttttaaatatattttcaaagtacataaaa

SEQ ID NO: 243 - DNA, 4018 bp, Homo sapiens
agagctaaataatgtctgacccgggcgcaaggcgcagcctggagctccgggtccccgacgctgccgccgccgcgcccgggcgcacccgcccgctcgctgtcccgcgcaccccgtagcgcctcgggctcccgggccggacagaggagccagcccggtgcgcccctccacctcctgctcggggggctttaatgagacacccaccgctgctgtggggccggcggggagcagcaccgcgacggggaccggggctgggcgctggagccagaatcggaaccacgatgtgactccgccgccggggacccgtgaggtttgtgtggaccccgagttccaccaggtgagaagagtgatgaccatccttttccttactatggttatttcatactttggttgcatgaaggctgcccccatgaaagaagcaaacatccgaggacaaggtggcttggcctacccaggtgtgcggacccatgggactctggagagcgtgaatgggcccaaggcaggttcaagaggcttgacatcattggctgacactttcgaacacgtgatagaagagctgttggatgaggaccagaaagttcggcccaatgaagaaaacaataaggacgcagacttgtacacgtccagggtgatgctcagtagtcaagtgcctttggagcctcctcttctctttctgctggaggaatacaaaaattacctagatgctgcaaacatgtccatgagggtccggcgccactctgaccctgcccgccgaggggagctgagcgtgtgtgacagtattagtgagtgggtaacggcagcagacaaaaagactgcagtggacatgtcgggcgggacggtcacagtccttgaaaaggtccctgtatcaaaaggccaactgaagcaatacttctacgagaccaagtgcaatcccatgggttacacaaaagaaggctgcaggggcatagacaaaaggcattggaactcccagtgccgaactacccagtcgtacgtgcgggcccttaccatggatagcaaaaagagaattggctggcgattcataaggatagacacttcttgtgtatgtacattgaccattaaaaggggaagatagtggatttatgttgtatagattagattatattgagacaaaaattatctatttgtatatatacataacagggtaaattattcagttaagaaaaaaataattttatgaactgcatgtataaatgaagtttatacagtacagtggttctacaatctatttattggacatgtccatgaccagaagggaaacagtcatttgcgcacaacttaaaaagtctgcattacattccttgataatgttgtggtttgttgccgttgccaagaactgaaaacataaaaagttaaaaaaaataataaattgcatgctgctttaattgtgaattgataataaactgtcctctttcagaaaacagaaaaaaaacacacacacacacaacaaaaatttgaaccaaaacattccgtttacattttagacagtaagtatcttcgttcttgttagtactatatctgttttactgcttttaacttctgatagcgttggaattaaaacaatgtcaaggtgctgttgtcattgctttactggcttaggggatgggggatggggggtatatttttgtttgttttgtgtttttttttcgtttgtttgttttgttttttagttcccacagggagtagagatggggaaagaattcctacaatatatattctggctgataaaagatacatttgtatgttgtgaagatgtttgcaatatcgatcagatgactagaaagtgaataaaaattaaggcaactgaacaaaaaaatgctcacactccacatcccgtgatgcacctcccaggccccgctcattctttgggcgttggtcagagtaagctgcttttgacggaaggacctatgtttgctcagaacacattctttccccccctccccctctggtctcctctttgttttgttttaaggaagaaaaatcagttgcgcgttctgaaatattttaccactgctgtgaacaagtgaacacattgtgtcacatcatgacactcgtataagcatggagaacagtgatttttttttagaacagaaaacaacaaaaaataaccccaaaatgaagattattttttatgaggagtgaacatttgggtaaatcatggctaagcttaaaaaaaactcatggtgaggcttaacaatgtcttgtaagcaaaaggtagagccctgtatcaacccagaaacacctagatcagaacaggaatccacattgccagtgacatgagactgaacagccaaatggaggctatgtggagttggcattgcatttaccggcagtgcgggaggaatttctgagtggccatcccaaggtctaggtggaggtggggcatggtatttgagacattccaaaacgaaggcctctgaaggacccttcagaggtggctctggaatgacatgtgtcaagctgcttggacctcgtgctttaagtgcctacattatctaactgtgctcaagaggttctcgactggaggaccacactcaagccgacttatgcccaccatcccacctctggataattttgcataaaattggattagcctggagcaggttgggagccaaatgtggcatttgtgatcatgagattgatgcaatgagatagaagatgtttgctacctgaacacttattgctttgaaactagacttgaggaaaccagggtttatcttttgagaacttttggtaagggaaaagggaacaggaaaagaaaccccaaactcaggccgaatgatcaaggggacccataggaaatcttgtccagagacaagacttcgggaaggtgtctggacattcagaacaccaagacttgaaggtgccttgctcaatggaagaggccaggacagagctgacaaaattttgctccccagtgaaggccacagcaaccttctgcccatcctgtctgttcatggagagggtccctgcctcacctctgccattttgggttaggagaagtcaagttgggagcctgaaatagtggttcttggaaaaatggatccccagtgaaaactagagctctaagcccattcagcccatttcacacctgaaaatgttagtgatcaccacttggaccagcatccttaagtatcagaaagccccaagcaattgctgcatcttagtagggtgagggataagcaaaagaggatgttcaccataacccaggaatgaagataccatcagcaaagaatttcaatttgttcagtctttcatttagagctagtctttcacagtaccatctgaatacctctttgaaagaaggaagactttacgtagtgtagatttgttttgtgttgtttgaaaatattatctttgtaattatttttaatatgtaaggaatgcttggaatatctgctgtatgtcaactttatgcagcttccttttgagggacaaatttaaaacaaacaaccccccatcacaaacttaaaggattgcaagggccagatctgttaagtggtttcataggagacacatccagcaattgtgtggtcagtggctcttttacccaataagatacatcacagtcacatgcttgatggtttatgttgacctaagatttattttgttaaaatctctctctgttgtgttcgttcttgttctgttttgttttgttttttaaagtcttgctgtggtctctttgtggcagaagtgtttcatgcatggcagcaggcctgttgcttttttatggcgattcccattgaaaatgtaagtaaatgtctgtggccttgttctctctatggtaaagatattattcaccatgtaaaacaaaaaacaatatttattgtattttagtatatttatataattatgttattgaaaaaaattggcattaaaacttaaccgcatcagaagcctattgtaaatacaagttctatttaagtgtactaattaacatataatatatgttttaaatatagaatttttaatgtttttaaatatattttcaaagtacataaaa

SEQ ID NO: 244 - DNA, 3918 bp, Homo sapiens
agagttgaaagctaggggagcgagacctcggggcgtgcgattctcactcgctccctcccgccccagcgcccacagccggggtttctgcagagggcgcgggacgcggggttccccggggctgaggctggggctggaacacccctcgaagccgcgggcgtcctgtccaaggcgccccaggagggcgcaggactcgcagggcgatgtcgcggggccctaggggaggagttccaccaggtgagaagagtgatgaccatccttttccttactatggttatttcatactttggttgcatgaaggctgcccccatgaaagaagcaaacatccgaggacaaggtggcttggcctacccaggtgtgcggacccatgggactctggagagcgtgaatgggcccaaggcaggttcaagaggcttgacatcattggctgacactttcgaacacgtgatagaagagctgttggatgaggaccagaaagttcggcccaatgaagaaaacaataaggacgcagacttgtacacgtccagggtgatgctcagtagtcaagtgcctttggagcctcctcttctctttctgctggaggaatacaaaaattacctagatgctgcaaacatgtccatgagggtccggcgccactctgaccctgcccgccgaggggagctgagcgtgtgtgacagtattagtgagtgggtaacggcagcagacaaaaagactgcagtggacatgtcgggcgggacggtcacagtccttgaaaaggtccctgtatcaaaaggccaactgaagcaatacttctacgagaccaagtgcaatcccatgggttacacaaaagaaggctgcaggggcatagacaaaaggcattggaactcccagtgccgaactacccagtcgtacgtgcgggcccttaccatggatagcaaaaagagaattggctggcgattcataaggatagacacttcttgtgtatgtacattgaccattaaaaggggaagatagtggatttatgttgtatagattagattatattgagacaaaaattatctatttgtatatatacataacagggtaaattattcagttaagaaaaaaataattttatgaactgcatgtataaatgaagtttatacagtacagtggttctacaatctatttattggacatgtccatgaccagaagggaaacagtcatttgcgcacaacttaaaaagtctgcattacattccttgataatgttgtggtttgttgccgttgccaagaactgaaaacataaaaagttaaaaaaaataataaattgcatgctgctttaattgtgaattgataataaactgtcctctttcagaaaacagaaaaaaaacacacacacacacaacaaaaatttgaaccaaaacattccgtttacattttagacagtaagtatcttcgttcttgttagtactatatctgttttactgcttttaacttctgatagcgttggaattaaaacaatgtcaaggtgctgttgtcattgctttactggcttaggggatgggggatggggggtatatttttgtttgttttgtgtttttttttcgtttgtttgttttgttttttagttcccacagggagtagagatggggaaagaattcctacaatatatattctggctgataaaagatacatttgtatgttgtgaagatgtttgcaatatcgatcagatgactagaaagtgaataaaaattaaggcaactgaacaaaaaaatgctcacactccacatcccgtgatgcacctcccaggccccgctcattctttgggcgttggtcagagtaagctgcttttgacggaaggacctatgtttgctcagaacacattctttccccccctccccctctggtctcctctttgttttgttttaaggaagaaaaatcagttgcgcgttctgaaatattttaccactgctgtgaacaagtgaacacattgtgtcacatcatgacactcgtataagcatggagaacagtgatttttttttagaacagaaaacaacaaaaaataaccccaaaatgaagattattttttatgaggagtgaacatttgggtaaatcatggctaagcttaaaaaaaactcatggtgaggcttaacaatgtcttgtaagcaaaaggtagagccctgtatcaacccagaaacacctagatcagaacaggaatccacattgccagtgacatgagactgaacagccaaatggaggctatgtggagttggcattgcatttaccggcagtgcgggaggaatttctgagtggccatcccaaggtctaggtggaggtggggcatggtatttgagacattccaaaacgaaggcctctgaaggacccttcagaggtggctctggaatgacatgtgtcaagctgcttggacctcgtgctttaagtgcctacattatctaactgtgctcaagaggttctcgactggaggaccacactcaagccgacttatgcccaccatcccacctctggataattttgcataaaattggattagcctggagcaggttgggagccaaatgtggcatttgtgatcatgagattgatgcaatgagatagaagatgtttgctacctgaacacttattgctttgaaactagacttgaggaaaccagggtttatcttttgagaacttttggtaagggaaaagggaacaggaaaagaaaccccaaactcaggccgaatgatcaaggggacccataggaaatcttgtccagagacaagacttcgggaaggtgtctggacattcagaacaccaagacttgaaggtgccttgctcaatggaagaggccaggacagagctgacaaaattttgctccccagtgaaggccacagcaaccttctgcccatcctgtctgttcatggagagggtccctgcctcacctctgccattttgggttaggagaagtcaagttgggagcctgaaatagtggttcttggaaaaatggatccccagtgaaaactagagctctaagcccattcagcccatttcacacctgaaaatgttagtgatcaccacttggaccagcatccttaagtatcagaaagccccaagcaattgctgcatcttagtagggtgagggataagcaaaagaggatgttcaccataacccaggaatgaagataccatcagcaaagaatttcaatttgttcagtctttcatttagagctagtctttcacagtaccatctgaatacctctttgaaagaaggaagactttacgtagtgtagatttgttttgtgttgtttgaaaatattatctttgtaattatttttaatatgtaaggaatgcttggaatatctgctgtatgtcaactttatgcagcttccttttgagggacaaatttaaaacaaacaaccccccatcacaaacttaaaggattgcaagggccagatctgttaagtggtttcataggagacacatccagcaattgtgtggtcagtggctcttttacccaataagatacatcacagtcacatgcttgatggtttatgttgacctaagatttattttgttaaaatctctctctgttgtgttcgttcttgttctgttttgttttgttttttaaagtcttgctgtggtctctttgtggcagaagtgtttcatgcatggcagcaggcctgttgcttttttatggcgattcccattgaaaatgtaagtaaatgtctgtggccttgttctctctatggtaaagatattattcaccatgtaaaacaaaaaacaatatttattgtattttagtatatttatataattatgttattgaaaaaaattggcattaaaacttaaccgcatcagaagcctattgtaaatacaagttctatttaagtgtactaattaacatataatatatgttttaaatatagaatttttaatgtttttaaatatattttcaaagtacataaaa

SEQ ID NO: 245 - DNA, 4125 bp, Homo sapiens
agagctaaataatgtctgacccgggcgcaaggcgcagcctggagctccgggtccccgacgctgccgccgccgcgcccgggcgcacccgcccgctcgctgtcccgcgcaccccgtagcgcctcgggctcccgggccggacagaggagccagcccggtgcgcccctccacctcctgctcggggggctttaatgagacacccaccgctgctgtggggccggcggggagcagcaccgcgacggggaccggggctgggcgctggagccagaatcggaaccacgatgtgactccgccgccggggacccgtgaggtttgtgtggaccccgagcatgagcagagatcattaaaaattaaacttacaaagctgctaaagtgggaagaaggagaacttgaagccacaatttttgcacttgcttagaagccatctaatctcagttccaccaggtgagaagagtgatgaccatccttttccttactatggttatttcatactttggttgcatgaaggctgcccccatgaaagaagcaaacatccgaggacaaggtggcttggcctacccaggtgtgcggacccatgggactctggagagcgtgaatgggcccaaggcaggttcaagaggcttgacatcattggctgacactttcgaacacgtgatagaagagctgttggatgaggaccagaaagttcggcccaatgaagaaaacaataaggacgcagacttgtacacgtccagggtgatgctcagtagtcaagtgcctttggagcctcctcttctctttctgctggaggaatacaaaaattacctagatgctgcaaacatgtccatgagggtccggcgccactctgaccctgcccgccgaggggagctgagcgtgtgtgacagtattagtgagtgggtaacggcagcagacaaaaagactgcagtggacatgtcgggcgggacggtcacagtccttgaaaaggtccctgtatcaaaaggccaactgaagcaatacttctacgagaccaagtgcaatcccatgggttacacaaaagaaggctgcaggggcatagacaaaaggcattggaactcccagtgccgaactacccagtcgtacgtgcgggcccttaccatggatagcaaaaagagaattggctggcgattcataaggatagacacttcttgtgtatgtacattgaccattaaaaggggaagatagtggatttatgttgtatagattagattatattgagacaaaaattatctatttgtatatatacataacagggtaaattattcagttaagaaaaaaataattttatgaactgcatgtataaatgaagtttatacagtacagtggttctacaatctatttattggacatgtccatgaccagaagggaaacagtcatttgcgcacaacttaaaaagtctgcattacattccttgataatgttgtggtttgttgccgttgccaagaactgaaaacataaaaagttaaaaaaaataataaattgcatgctgctttaattgtgaattgataataaactgtcctctttcagaaaacagaaaaaaaacacacacacacacaacaaaaatttgaaccaaaacattccgtttacattttagacagtaagtatcttcgttcttgttagtactatatctgttttactgcttttaacttctgatagcgttggaattaaaacaatgtcaaggtgctgttgtcattgctttactggcttaggggatgggggatggggggtatatttttgtttgttttgtgtttttttttcgtttgtttgttttgttttttagttcccacagggagtagagatggggaaagaattcctacaatatatattctggctgataaaagatacatttgtatgttgtgaagatgtttgcaatatcgatcagatgactagaaagtgaataaaaattaaggcaactgaacaaaaaaatgctcacactccacatcccgtgatgcacctcccaggccccgctcattctttgggcgttggtcagagtaagctgcttttgacggaaggacctatgtttgctcagaacacattctttccccccctccccctctggtctcctctttgttttgttttaaggaagaaaaatcagttgcgcgttctgaaatattttaccactgctgtgaacaagtgaacacattgtgtcacatcatgacactcgtataagcatggagaacagtgatttttttttagaacagaaaacaacaaaaaataaccccaaaatgaagattattttttatgaggagtgaacatttgggtaaatcatggctaagcttaaaaaaaactcatggtgaggcttaacaatgtcttgtaagcaaaaggtagagccctgtatcaacccagaaacacctagatcagaacaggaatccacattgccagtgacatgagactgaacagccaaatggaggctatgtggagttggcattgcatttaccggcagtgcgggaggaatttctgagtggccatcccaaggtctaggtggaggtggggcatggtatttgagacattccaaaacgaaggcctctgaaggacccttcagaggtggctctggaatgacatgtgtcaagctgcttggacctcgtgctttaagtgcctacattatctaactgtgctcaagaggttctcgactggaggaccacactcaagccgacttatgcccaccatcccacctctggataattttgcataaaattggattagcctggagcaggttgggagccaaatgtggcatttgtgatcatgagattgatgcaatgagatagaagatgtttgctacctgaacacttattgctttgaaactagacttgaggaaaccagggtttatcttttgagaacttttggtaagggaaaagggaacaggaaaagaaaccccaaactcaggccgaatgatcaaggggacccataggaaatcttgtccagagacaagacttcgggaaggtgtctggacattcagaacaccaagacttgaaggtgccttgctcaatggaagaggccaggacagagctgacaaaattttgctccccagtgaaggccacagcaaccttctgcccatcctgtctgttcatggagagggtccctgcctcacctctgccattttgggttaggagaagtcaagttgggagcctgaaatagtggttcttggaaaaatggatccccagtgaaaactagagctctaagcccattcagcccatttcacacctgaaaatgttagtgatcaccacttggaccagcatccttaagtatcagaaagccccaagcaattgctgcatcttagtagggtgagggataagcaaaagaggatgttcaccataacccaggaatgaagataccatcagcaaagaatttcaatttgttcagtctttcatttagagctagtctttcacagtaccatctgaatacctctttgaaagaaggaagactttacgtagtgtagatttgttttgtgttgtttgaaaatattatctttgtaattatttttaatatgtaaggaatgcttggaatatctgctgtatgtcaactttatgcagcttccttttgagggacaaatttaaaacaaacaaccccccatcacaaacttaaaggattgcaagggccagatctgttaagtggtttcataggagacacatccagcaattgtgtggtcagtggctcttttacccaataagatacatcacagtcacatgcttgatggtttatgttgacctaagatttattttgttaaaatctctctctgttgtgttcgttcttgttctgttttgttttgttttttaaagtcttgctgtggtctctttgtggcagaagtgtttcatgcatggcagcaggcctgttgcttttttatggcgattcccattgaaaatgtaagtaaatgtctgtggccttgttctctctatggtaaagatattattcaccatgtaaaacaaaaaacaatatttattgtattttagtatatttatataattatgttattgaaaaaaattggcattaaaacttaaccgcatcagaagcctattgtaaatacaagttctatttaagtgtactaattaacatataatatatgttttaaatatagaatttttaatgtttttaaatatattttcaaagtacataaaa

SEQ ID NO: 246 - DNA, 4176 bp, Homo sapiens
gtaaaccaatagcccccatgctctgtgcgatttcattgtgtgctcgcgttcgcaagctccgtagtgcaggaaggtgcgggaagttaagtaattaaaagaaattatagagtgggatgcaaaaataacccgaaggacaactggatgtgtggagccaccagttttctccatgagtgcacaaggttaatccttgttactactcagaatgctgagtttctacagaaagggttgcaggtccacacatgttttggcgtctacccacacgcttctgtatggcatgactgtgcatcccagaagaagggctgtgctgtgtacctccacgtttcagtggaatttaacaaactgatccctgaaaatggtttcataaagggatggtaataaagtctcttagtggttgaaaatgttatttcttacaaaagtggagaacatttgcttttcaataccagagttttcagccatttctgcattctgacctattgactggagttccaccaggtgagaagagtgatgaccatccttttccttactatggttatttcatactttggttgcatgaaggctgcccccatgaaagaagcaaacatccgaggacaaggtggcttggcctacccaggtgtgcggacccatgggactctggagagcgtgaatgggcccaaggcaggttcaagaggcttgacatcattggctgacactttcgaacacgtgatagaagagctgttggatgaggaccagaaagttcggcccaatgaagaaaacaataaggacgcagacttgtacacgtccagggtgatgctcagtagtcaagtgcctttggagcctcctcttctctttctgctggaggaatacaaaaattacctagatgctgcaaacatgtccatgagggtccggcgccactctgaccctgcccgccgaggggagctgagcgtgtgtgacagtattagtgagtgggtaacggcagcagacaaaaagactgcagtggacatgtcgggcgggacggtcacagtccttgaaaaggtccctgtatcaaaaggccaactgaagcaatacttctacgagaccaagtgcaatcccatgggttacacaaaagaaggctgcaggggcatagacaaaaggcattggaactcccagtgccgaactacccagtcgtacgtgcgggcccttaccatggatagcaaaaagagaattggctggcgattcataaggatagacacttcttgtgtatgtacattgaccattaaaaggggaagatagtggatttatgttgtatagattagattatattgagacaaaaattatctatttgtatatatacataacagggtaaattattcagttaagaaaaaaataattttatgaactgcatgtataaatgaagtttatacagtacagtggttctacaatctatttattggacatgtccatgaccagaagggaaacagtcatttgcgcacaacttaaaaagtctgcattacattccttgataatgttgtggtttgttgccgttgccaagaactgaaaacataaaaagttaaaaaaaataataaattgcatgctgctttaattgtgaattgataataaactgtcctctttcagaaaacagaaaaaaaacacacacacacacaacaaaaatttgaaccaaaacattccgtttacattttagacagtaagtatcttcgttcttgttagtactatatctgttttactgcttttaacttctgatagcgttggaattaaaacaatgtcaaggtgctgttgtcattgctttactggcttaggggatgggggatggggggtatatttttgtttgttttgtgtttttttttcgtttgtttgttttgttttttagttcccacagggagtagagatggggaaagaattcctacaatatatattctggctgataaaagatacatttgtatgttgtgaagatgtttgcaatatcgatcagatgactagaaagtgaataaaaattaaggcaactgaacaaaaaaatgctcacactccacatcccgtgatgcacctcccaggccccgctcattctttgggcgttggtcagagtaagctgcttttgacggaaggacctatgtttgctcagaacacattctttccccccctccccctctggtctcctctttgttttgttttaaggaagaaaaatcagttgcgcgttctgaaatattttaccactgctgtgaacaagtgaacacattgtgtcacatcatgacactcgtataagcatggagaacagtgatttttttttagaacagaaaacaacaaaaaataaccccaaaatgaagattattttttatgaggagtgaacatttgggtaaatcatggctaagcttaaaaaaaactcatggtgaggcttaacaatgtcttgtaagcaaaaggtagagccctgtatcaacccagaaacacctagatcagaacaggaatccacattgccagtgacatgagactgaacagccaaatggaggctatgtggagttggcattgcatttaccggcagtgcgggaggaatttctgagtggccatcccaaggtctaggtggaggtggggcatggtatttgagacattccaaaacgaaggcctctgaaggacccttcagaggtggctctggaatgacatgtgtcaagctgcttggacctcgtgctttaagtgcctacattatctaactgtgctcaagaggttctcgactggaggaccacactcaagccgacttatgcccaccatcccacctctggataattttgcataaaattggattagcctggagcaggttgggagccaaatgtggcatttgtgatcatgagattgatgcaatgagatagaagatgtttgctacctgaacacttattgctttgaaactagacttgaggaaaccagggtttatcttttgagaacttttggtaagggaaaagggaacaggaaaagaaaccccaaactcaggccgaatgatcaaggggacccataggaaatcttgtccagagacaagacttcgggaaggtgtctggacattcagaacaccaagacttgaaggtgccttgctcaatggaagaggccaggacagagctgacaaaattttgctccccagtgaaggccacagcaaccttctgcccatcctgtctgttcatggagagggtccctgcctcacctctgccattttgggttaggagaagtcaagttgggagcctgaaatagtggttcttggaaaaatggatccccagtgaaaactagagctctaagcccattcagcccatttcacacctgaaaatgttagtgatcaccacttggaccagcatccttaagtatcagaaagccccaagcaattgctgcatcttagtagggtgagggataagcaaaagaggatgttcaccataacccaggaatgaagataccatcagcaaagaatttcaatttgttcagtctttcatttagagctagtctttcacagtaccatctgaatacctctttgaaagaaggaagactttacgtagtgtagatttgttttgtgttgtttgaaaatattatctttgtaattatttttaatatgtaaggaatgcttggaatatctgctgtatgtcaactttatgcagcttccttttgagggacaaatttaaaacaaacaaccccccatcacaaacttaaaggattgcaagggccagatctgttaagtggtttcataggagacacatccagcaattgtgtggtcagtggctcttttacccaataagatacatcacagtcacatgcttgatggtttatgttgacctaagatttattttgttaaaatctctctctgttgtgttcgttcttgttctgttttgttttgttttttaaagtcttgctgtggtctctttgtggcagaagtgtttcatgcatggcagcaggcctgttgcttttttatggcgattcccattgaaaatgtaagtaaatgtctgtggccttgttctctctatggtaaagatattattcaccatgtaaaacaaaaaacaatatttattgtattttagtatatttatataattatgttattgaaaaaaattggcattaaaacttaaccgcatcagaagcctattgtaaatacaagttctatttaagtgtactaattaacatataatatatgttttaaatatagaatttttaatgtttttaaatatattttcaaagtacataaaa

SEQ ID NO: 247 - DNA, 4340 bp, Homo sapiens
attattaaagcggtagtctgccggcgctgataagcaacaagttccccagcggtcttcccgccctagcctgacaaggcgaaggttttcttacctggcgacagggaaatctcccgagccgaattcagcttcgccggagccccaggtgtgacctgcgtagtgggcaagggagcggtgtgcaggctgagtttttttttttacaggggtaccctgaaactcctcactttctctgggaactttcagtgccaggacccagtaacgggcggttagaaggcagccctaggaaacacctgctacatagcagggcagttgggcaatcattggtaacctcgctcattcattagaatcacgtaagaactcaaaaggaaacgtgtctctcggagtgagggcgtttgcgtaaatctataggtttttcgacatcgatgccagttgctttgtcttctgtagtcgccaaggtggttgagagtttaagcttgcggatattgcaaagggttattagattcataagtcacaccaagtggtgggcgatccactgagcaaagccgaacttctcacatgatgacttcaaacaagacacattaccttccagcatctgttggggagacgagattttaagacacttgagtctccaggacagcaaaggcacaatgttccaccaggtgagaagagtgatgaccatccttttccttactatggttatttcatactttggttgcatgaaggctgcccccatgaaagaagcaaacatccgaggacaaggtggcttggcctacccaggtgtgcggacccatgggactctggagagcgtgaatgggcccaaggcaggttcaagaggcttgacatcattggctgacactttcgaacacgtgatagaagagctgttggatgaggaccagaaagttcggcccaatgaagaaaacaataaggacgcagacttgtacacgtccagggtgatgctcagtagtcaagtgcctttggagcctcctcttctctttctgctggaggaatacaaaaattacctagatgctgcaaacatgtccatgagggtccggcgccactctgaccctgcccgccgaggggagctgagcgtgtgtgacagtattagtgagtgggtaacggcagcagacaaaaagactgcagtggacatgtcgggcgggacggtcacagtccttgaaaaggtccctgtatcaaaaggccaactgaagcaatacttctacgagaccaagtgcaatcccatgggttacacaaaagaaggctgcaggggcatagacaaaaggcattggaactcccagtgccgaactacccagtcgtacgtgcgggcccttaccatggatagcaaaaagagaattggctggcgattcataaggatagacacttcttgtgtatgtacattgaccattaaaaggggaagatagtggatttatgttgtatagattagattatattgagacaaaaattatctatttgtatatatacataacagggtaaattattcagttaagaaaaaaataattttatgaactgcatgtataaatgaagtttatacagtacagtggttctacaatctatttattggacatgtccatgaccagaagggaaacagtcatttgcgcacaacttaaaaagtctgcattacattccttgataatgttgtggtttgttgccgttgccaagaactgaaaacataaaaagttaaaaaaaataataaattgcatgctgctttaattgtgaattgataataaactgtcctctttcagaaaacagaaaaaaaacacacacacacacaacaaaaatttgaaccaaaacattccgtttacattttagacagtaagtatcttcgttcttgttagtactatatctgttttactgcttttaacttctgatagcgttggaattaaaacaatgtcaaggtgctgttgtcattgctttactggcttaggggatgggggatggggggtatatttttgtttgttttgtgtttttttttcgtttgtttgttttgttttttagttcccacagggagtagagatggggaaagaattcctacaatatatattctggctgataaaagatacatttgtatgttgtgaagatgtttgcaatatcgatcagatgactagaaagtgaataaaaattaaggcaactgaacaaaaaaatgctcacactccacatcccgtgatgcacctcccaggccccgctcattctttgggcgttggtcagagtaagctgcttttgacggaaggacctatgtttgctcagaacacattctttccccccctccccctctggtctcctctttgttttgttttaaggaagaaaaatcagttgcgcgttctgaaatattttaccactgctgtgaacaagtgaacacattgtgtcacatcatgacactcgtataagcatggagaacagtgatttttttttagaacagaaaacaacaaaaaataaccccaaaatgaagattattttttatgaggagtgaacatttgggtaaatcatggctaagcttaaaaaaaactcatggtgaggcttaacaatgtcttgtaagcaaaaggtagagccctgtatcaacccagaaacacctagatcagaacaggaatccacattgccagtgacatgagactgaacagccaaatggaggctatgtggagttggcattgcatttaccggcagtgcgggaggaatttctgagtggccatcccaaggtctaggtggaggtggggcatggtatttgagacattccaaaacgaaggcctctgaaggacccttcagaggtggctctggaatgacatgtgtcaagctgcttggacctcgtgctttaagtgcctacattatctaactgtgctcaagaggttctcgactggaggaccacactcaagccgacttatgcccaccatcccacctctggataattttgcataaaattggattagcctggagcaggttgggagccaaatgtggcatttgtgatcatgagattgatgcaatgagatagaagatgtttgctacctgaacacttattgctttgaaactagacttgaggaaaccagggtttatcttttgagaacttttggtaagggaaaagggaacaggaaaagaaaccccaaactcaggccgaatgatcaaggggacccataggaaatcttgtccagagacaagacttcgggaaggtgtctggacattcagaacaccaagacttgaaggtgccttgctcaatggaagaggccaggacagagctgacaaaattttgctccccagtgaaggccacagcaaccttctgcccatcctgtctgttcatggagagggtccctgcctcacctctgccattttgggttaggagaagtcaagttgggagcctgaaatagtggttcttggaaaaatggatccccagtgaaaactagagctctaagcccattcagcccatttcacacctgaaaatgttagtgatcaccacttggaccagcatccttaagtatcagaaagccccaagcaattgctgcatcttagtagggtgagggataagcaaaagaggatgttcaccataacccaggaatgaagataccatcagcaaagaatttcaatttgttcagtctttcatttagagctagtctttcacagtaccatctgaatacctctttgaaagaaggaagactttacgtagtgtagatttgttttgtgttgtttgaaaatattatctttgtaattatttttaatatgtaaggaatgcttggaatatctgctgtatgtcaactttatgcagcttccttttgagggacaaatttaaaacaaacaaccccccatcacaaacttaaaggattgcaagggccagatctgttaagtggtttcataggagacacatccagcaattgtgtggtcagtggctcttttacccaataagatacatcacagtcacatgcttgatggtttatgttgacctaagatttattttgttaaaatctctctctgttgtgttcgttcttgttctgttttgttttgttttttaaagtcttgctgtggtctctttgtggcagaagtgtttcatgcatggcagcaggcctgttgcttttttatggcgattcccattgaaaatgtaagtaaatgtctgtggccttgttctctctatggtaaagatattattcaccatgtaaaacaaaaaacaatatttattgtattttagtatatttatataattatgttattgaaaaaaattggcattaaaacttaaccgcatcagaagcctattgtaaatacaagttctatttaagtgtactaattaacatataatatatgttttaaatatagaatttttaatgtttttaaatatattttcaaagtacataaaa

SEQ ID NO: 248 - DNA, 1141 bp, Homo sapiens
gagttgaagctcctctcccttccgaacagctccgcgcaccgccccgcgacgcagcccggcgcaactactttcttctctctcctttctttcttcctctcctttttcccctgctgggtagtggctgcggcggggtgggggagactttgaatgaccgagctcgcgtccacctttctcttcatgtcgacgtccctggaaacggccacacggatgccatggttacttttgccacgatcttacaggtgaacaaggtgatgtccatcttgttttatgtgatatttctcgcttatctccgtggcatccaaggtaacaacatggatcaaaggagtttgccagaagactcgctcaattccctcattattaagctgatccaggcagatattttgaaaaacaagctctccaagcagatggtggacgttaaggaaaattaccagagcaccctgcccaaagctgaggctccccgagagccggagcggggagggcccgccaagtcagcattccagccggtgattgcaatggacaccgaactgctgcgacaacagagacgctacaactcaccgcgggtcctgctgagcgacagcacccccttggagcccccgcccttgtatctcatggaggattacgtgggcagccccgtggtggcgaacagaacatcacggcggaaacggtacgcggagcataagagtcaccgaggggagtactcggtatgtgacagtgagagtctgtgggtgaccgacaagtcatcggccatcgacattcggggacaccaggtcacggtgctgggggagatcaaaacgggcaactctcccgtcaaacaatatttttatgaaacgcgatgtaaggaagccaggccggtcaaaaacggttgcaggggtattgatgataaacactggaactctcagtgcaaaacatcccaaacctacgtccgagcactgacttcagagaacaataaactcgtgggctggcggtggatacggatagacacgtcctgtgtgtgtgccttgtcgagaaaaatcggaagaacatgaattggcatctctccccatatataaattattactttaaattatatgatatgcatgtagcatataaatgtttatattgtttttatatattataagttgacctttatttattaaacttc

SEQ ID NO: 249 - DNA, 1167 bp, Homo sapiens
tgccagaataacacagactcagctgccagagcctgctcttaacacctgtgtttccttttcagatcttacaggtgaacaaggtgatgtccatcttgttttatgtgatatttctcgcttatctccgtggcatccaaggtaacaacatggatcaaaggagtttgccagaagactcgctcaattccctcattattaagctgatccaggcagatattttgaaaaacaagctctccaagcagatggtggacgttaaggaaaattaccagagcaccctgcccaaagctgaggctccccgagagccggagcggggagggcccgccaagtcagcattccagccggtgattgcaatggacaccgaactgctgcgacaacagagacgctacaactcaccgcgggtcctgctgagcgacagcacccccttggagcccccgcccttgtatctcatggaggattacgtgggcagccccgtggtggcgaacagaacatcacggcggaaacggtacgcggagcataagagtcaccgaggggagtactcggtatgtgacagtgagagtctgtgggtgaccgacaagtcatcggccatcgacattcggggacaccaggtcacggtgctgggggagatcaaaacgggcaactctcccgtcaaacaatatttttatgaaacgcgatgtaaggaagccaggccggtcaaaaacggttgcaggggtattgatgataaacactggaactctcagtgcaaaacatcccaaacctacgtccgagcactgacttcagagaacaataaactcgtgggctggcggtggatacggatagacacgtcctgtgtgtgtgccttgtcgagaaaaatcggaagaacatgaattggcatctctccccatatataaattattactttaaattatatgatatgcatgtagcatataaatgtttatattgtttttatatattataagttgacctttatttattaaacttcagcaaccctacagtatataagcttttttctcaataaaatcagtgtgcttgccttccctcaggcctctcccatctgttaaaacttgttttgtgatccggctctcaggagtcactctgtaaaatctgtgtacaccagtattttgcattcagtattgtcaaggccatgactgttgttttagtaaacttgttaaaatc

SEQ ID NO: 250 - DNA, 999 bp, Homo sapiens
cctaggtggttgccccctccctctcctgagatgtcaggaaggagggggccacctgtgtcctccacaggggccccccgaagcctggggactcccagccccagagctccgaggcggaggaggtgctgacaggtgctccgagagatgctccctctcccctcatgctccctccccatcctcctccttttcctcctccccagtgtgccaattgagtcccaacccccaccctcaacattgcccccttttctggcccctgagtgggaccttctctccccccgagtagtcctgtctaggggtgcccctgctgggccccctctgctcttcctgctggaggctggggcctttcgggagtcagcaggtgccccggccaaccgcagccggcgtggggtgagcgaaactgcaccagcgagtcgtcggggtgagctggctgtgtgcgatgcagtcagtggctgggtgacagaccgccggaccgctgtggacttgcgtgggcgcgaggtggaggtgttgggcgaggtgcctgcagctggcggcagtcccctccgccagtacttctttgaaacccgctgcaaggctgataacgctgaggaaggtggcccgggggcaggtggagggggctgccggggagtggacaggaggcactgggtatctgagtgcaaggccaagcagtcctatgtgcgggcattgaccgctgatgcccagggccgtgtgggctggcgatggattcgaattgacactgcctgcgtctgcacactcctcagccggactggccgggcctgagacccatgcccaggaaaataacagagctggatgctgagagacctcagggatggcccagctgatctaaggaccccagtttgggaactcatcaaataatcacaaaatcacaattctctgattttgagctcaatctctgcaggatgggtgaaaccacatggggttttggaggttgaataggagttctcctggagcaacttgagggtaataatgatgatgatataataa

SEQ ID NO: 251 - DNA, 4489 bp, Homo sapiens
aaaaagagaaactgttgggagaggaatcgtatctccatatttcttctttcagccccaatccaagggttgtagctggaactttccatcagttcttcctttctttttcctctctaagcctttgccttgctctgtcacagtgaagtcagccagagcagggctgttaaactctgtgaaatttgtcataagggtgtcaggtatttcttactggcttccaaagaaacatagataaagaaatctttcctgtggcttcccttggcaggctgcattcagaaggtctctcagttgaagaaagagcttggaggacaacagcacaacaggagagtaaaagatgccccagggctgaggcctccgctcaggcagccgcatctggggtcaatcatactcaccttgcccgggccatgctccagcaaaatcaagctgttttcttttgaaagttcaaactcatcaagattatgctgctcactcttatcattctgttgccagtagtttcaaaatttagttttgttagtctctcagcaccgcagcactggagctgtcctgaaggtactctcgcaggaaatgggaattctacttgtgtgggtcctgcacccttcttaattttctcccatggaaatagtatctttaggattgacacagaaggaaccaattatgagcaattggtggtggatgctggtgtctcagtgatcatggattttcattataatgagaaaagaatctattgggtggatttagaaagacaacttttgcaaagagtttttctgaatgggtcaaggcaagagagagtatgtaatatagagaaaaatgtttctggaatggcaataaattggataaatgaagaagttatttggtcaaatcaacaggaaggaatcattacagtaacagatatgaaaggaaataattcccacattcttttaagtgctttaaaatatcctgcaaatgtagcagttgatccagtagaaaggtttatattttggtcttcagaggtggctggaagcctttatagagcagatctcgatggtgtgggagtgaaggctctgttggagacatcagagaaaataacagctgtgtcattggatgtgcttgataagcggctgttttggattcagtacaacagagaaggaagcaattctcttatttgctcctgtgattatgatggaggttctgtccacattagtaaacatccaacacagcataatttgtttgcaatgtccctttttggtgaccgtatcttctattcaacatggaaaatgaagacaatttggatagccaacaaacacactggaaaggacatggttagaattaacctccattcatcatttgtaccacttggtgaactgaaagtagtgcatccacttgcacaacccaaggcagaagatgacacttgggagcctgatgttaatgaatgtgctttttggaatcatggctgtactcttgggtgtaaaaacacccctggatcctattactgcacgtgccctgtaggatttgttctgcttcctgatgggaaacgatgtcatcaacttgtttcctgtccacgcaatgtgtctgaatgcagccatgactgtgttctgacatcagaaggtcccttatgtttctgtcctgaaggctcagtgcttgagagagatgggaaaacatgtagcggttgttcctcacccgataatggtggatgtagccagctctgcgttcctcttagcccagtatcctgggaatgtgattgctttcctgggtatgacctacaactggatgaaaaaagctgtgcagcttcaggaccacaaccatttttgctgtttgccaattctcaagatattcgacacatgcattttgatggaacagactatggaactctgctcagccagcagatgggaatggtttatgccctagatcatgaccctgtggaaaataagatatactttgcccatacagccctgaagtggatagagagagctaatatggatggttcccagcgagaaaggcttattgaggaaggagtagatgtgccagaaggtcttgctgtggactggattggccgtagattctattggacagacagagggaaatctctgattggaaggagtgatttaaatgggaaacgttccaaaataatcactaaggagaacatctctcaaccacgaggaattgctgttcatccaatggccaagagattattctggactgatacagggattaatccacgaattgaaagttcttccctccaaggccttggccgtctggttatagccagctctgatctaatctggcccagtggaataacgattgacttcttaactgacaagttgtactggtgcgatgccaagcagtctgtgattgaaatggccaatctggatggttcaaaacgccgaagacttacccagaatgatgtaggtcacccatttgctgtagcagtgtttgaggattatgtgtggttctcagattgggctatgccatcagtaatgagagtaaacaagaggactggcaaagatagagtacgtctccaaggcagcatgctgaagccctcatcactggttgtggttcatccattggcaaaaccaggagcagatccctgcttatatcaaaacggaggctgtgaacatatttgcaaaaagaggcttggaactgcttggtgttcgtgtcgtgaaggttttatgaaagcctcagatgggaaaacgtgtctggctctggatggtcatcagctgttggcaggtggtgaagttgatctaaagaaccaagtaacaccattggacatcttgtccaagactagagtgtcagaagataacattacagaatctcaacacatgctagtggctgaaatcatggtgtcagatcaagatgactgtgctcctgtgggatgcagcatgtatgctcggtgtatttcagagggagaggatgccacatgtcagtgtttgaaaggatttgctggggatggaaaactatgttctgatatagatgaatgtgagatgggtgtcccagtgtgcccccctgcctcctccaagtgcatcaacaccgaaggtggttatgtctgccggtgctcagaaggctaccaaggagatgggattcactgtcttgatattgatgagtgccaactgggggagcacagctgtggagagaatgccagctgcacaaatacagagggaggctatacctgcatgtgtgctggacgcctgtctgaaccaggactgatttgccctgactctactccaccccctcacctcagggaagatgaccaccactattccgtaagaaatagtgactctgaatgtcccctgtcccacgatgggtactgcctccatgatggtgtgtgcatgtatattgaagcattggacaagtatgcatgcaactgtgttgttggctacatcggggagcgatgtcagtaccgagacctgaagtggtgggaactgcgccacgctggccacgggcagcagcagaaggtcatcgtggtggctgtctgcgtggtggtgcttgtcatgctgctcctcctgagcctgtggggggcccactactacaggactcagaagctgctatcgaaaaacccaaagaatccttatgaggagtcgagcagagatgtgaggagtcgcaggcctgctgacactgaggatgggatgtcctcttgccctcaaccttggtttgtggttataaaagaacaccaagacctcaagaatgggggtcaaccagtggctggtgaggatggccaggcagcagatgggtcaatgcaaccaacttcatggaggcaggagccccagttatgtggaatgggcacagagcaaggctgctggattccagtatccagtgataagggctcctgtccccaggtaatggagcgaagctttcatatgccctcctatgggacacagacccttgaagggggtgtcgagaagccccattctctcctatcagctaacccattatggcaacaaagggccctggacccaccacaccaaatggagctgactcagtgaaaactggaattaaaaggaaagtcaagaagaatgaactatgtcgatgcacagtatcttttctttcaaaagtagagcaaaactataggttttggttccacaatctctacgactaatcacctactcaatgcctggagacagatacgtagttgtgcttttgtttgctcttttaagcagtctcactgcagtcttatttccaagtaagagtactgggagaatcactaggtaacttattagaaacccaaattgggacaacagtgctttgtaaattgtgttgtcttcagcagtcaatacaaatagatttttgtttttgttgttcctgcagccccagaagaaattaggggttaaagcagacagtcacactggtttggtcagttacaaagtaatttctttgatctggacagaacatttatatcagtttcatgaaatgattggaatattacaataccgttaagatacagtgtaggcatttaactcctcattggcgtggtccatgctgatgattttgcaaaatgagttgtgatgaatcaatgaaaaatgta

SEQ ID NO: 252 - DNA, 4880 bp, Homo sapiens
gaaactgttgggagaggaatcgtatctccatatttcttctttcagccccaatccaagggttgtagctggaactttccatcagttcttcctttctttttcctctctaagcctttgccttgctctgtcacagtgaagtcagccagagcagggctgttaaactctgtgaaatttgtcataagggtgtcaggtatttcttactggcttccaaagaaacatagataaagaaatctttcctgtggcttcccttggcaggctgcattcagaaggtctctcagttgaagaaagagcttggaggacaacagcacaacaggagagtaaaagatgccccagggctgaggcctccgctcaggcagccgcatctggggtcaatcatactcaccttgcccgggccatgctccagcaaaatcaagctgttttcttttgaaagttcaaactcatcaagattatgctgctcactcttatcattctgttgccagtagtttcaaaatttagttttgttagtctctcagcaccgcagcactggagctgtcctgaaggtactctcgcaggaaatgggaattctacttgtgtgggtcctgcacccttcttaattttctcccatggaaatagtatctttaggattgacacagaaggaaccaattatgagcaattggtggtggatgctggtgtctcagtgatcatggattttcattataatgagaaaagaatctattgggtggatttagaaagacaacttttgcaaagagtttttctgaatgggtcaaggcaagagagagtatgtaatatagagaaaaatgtttctggaatggcaataaattggataaatgaagaagttatttggtcaaatcaacaggaaggaatcattacagtaacagatatgaaaggaaataattcccacattcttttaagtgctttaaaatatcctgcaaatgtagcagttgatccagtagaaaggtttatattttggtcttcagaggtggctggaagcctttatagagcagatctcgatggtgtgggagtgaaggctctgttggagacatcagagaaaataacagctgtgtcattggatgtgcttgataagcggctgttttggattcagtacaacagagaaggaagcaattctcttatttgctcctgtgattatgatggaggttctgtccacattagtaaacatccaacacagcataatttgtttgcaatgtccctttttggtgaccgtatcttctattcaacatggaaaatgaagacaatttggatagccaacaaacacactggaaaggacatggttagaattaacctccattcatcatttgtaccacttggtgaactgaaagtagtgcatccacttgcacaacccaaggcagaagatgacacttgggagcctgagcagaaactttgcaaattgaggaaaggaaactgcagcagcactgtgtgtgggcaagacctccagtcacacttgtgcatgtgtgcagagggatacgccctaagtcgagaccggaagtactgtgaagatgttaatgaatgtgctttttggaatcatggctgtactcttgggtgtaaaaacacccctggatcctattactgcacgtgccctgtaggatttgttctgcttcctgatgggaaacgatgtcatcaacttgtttcctgtccacgcaatgtgtctgaatgcagccatgactgtgttctgacatcagaaggtcccttatgtttctgtcctgaaggctcagtgcttgagagagatgggaaaacatgtagcggttgttcctcacccgataatggtggatgtagccagctctgcgttcctcttagcccagtatcctgggaatgtgattgctttcctgggtatgacctacaactggatgaaaaaagctgtgcagcttcaggaccacaaccatttttgctgtttgccaattctcaagatattcgacacatgcattttgatggaacagactatggaactctgctcagccagcagatgggaatggtttatgccctagatcatgaccctgtggaaaataagatatactttgcccatacagccctgaagtggatagagagagctaatatggatggttcccagcgagaaaggcttattgaggaaggagtagatgtgccagaaggtcttgctgtggactggattggccgtagattctattggacagacagagggaaatctctgattggaaggagtgatttaaatgggaaacgttccaaaataatcactaaggagaacatctctcaaccacgaggaattgctgttcatccaatggccaagagattattctggactgatacagggattaatccacgaattgaaagttcttccctccaaggccttggccgtctggttatagccagctctgatctaatctggcccagtggaataacgattgacttcttaactgacaagttgtactggtgcgatgccaagcagtctgtgattgaaatggccaatctggatggttcaaaacgccgaagacttacccagaatgatgtaggtcacccatttgctgtagcagtgtttgaggattatgtgtggttctcagattgggctatgccatcagtaatgagagtaaacaagaggactggcaaagatagagtacgtctccaaggcagcatgctgaagccctcatcactggttgtggttcatccattggcaaaaccaggagcagatccctgcttatatcaaaacggaggctgtgaacatatttgcaaaaagaggcttggaactgcttggtgttcgtgtcgtgaaggttttatgaaagcctcagatgggaaaacgtgtctggctctggatggtcatcagctgttggcaggtggtgaagttgatctaaagaaccaagtaacaccattggacatcttgtccaagactagagtgtcagaagataacattacagaatctcaacacatgctagtggctgaaatcatggtgtcagatcaagatgactgtgctcctgtgggatgcagcatgtatgctcggtgtatttcagagggagaggatgccacatgtcagtgtttgaaaggatttgctggggatggaaaactatgttctgatatagatgaatgtgagatgggtgtcccagtgtgcccccctgcctcctccaagtgcatcaacaccgaaggtggttatgtctgccggtgctcagaaggctaccaaggagatgggattcactgtcttgatattgatgagtgccaactgggggagcacagctgtggagagaatgccagctgcacaaatacagagggaggctatacctgcatgtgtgctggacgcctgtctgaaccaggactgatttgccctgactctactccaccccctcacctcagggaagatgaccaccactattccgtaagaaatagtgactctgaatgtcccctgtcccacgatgggtactgcctccatgatggtgtgtgcatgtatattgaagcattggacaagtatgcatgcaactgtgttgttggctacatcggggagcgatgtcagtaccgagacctgaagtggtgggaactgcgccacgctggccacgggcagcagcagaaggtcatcgtggtggctgtctgcgtggtggtgcttgtcatgctgctcctcctgagcctgtggggggcccactactacaggactcagaagctgctatcgaaaaacccaaagaatccttatgaggagtcgagcagagatgtgaggagtcgcaggcctgctgacactgaggatgggatgtcctcttgccctcaaccttggtttgtggttataaaagaacaccaagacctcaagaatgggggtcaaccagtggctggtgaggatggccaggcagcagatgggtcaatgcaaccaacttcatggaggcaggagccccagttatgtggaatgggcacagagcaaggctgctggattccagtatccagtgataagggctcctgtccccaggtaatggagcgaagctttcatatgccctcctatgggacacagacccttgaagggggtgtcgagaagccccattctctcctatcagctaacccattatggcaacaaagggccctggacccaccacaccaaatggagctgactcagtgaaaactggaattaaaaggaaagtcaagaagaatgaactatgtcgatgcacagtatcttttctttcaaaagtagagcaaaactataggttttggttccacaatctctacgactaatcacctactcaatgcctggagacagatacgtagttgtgcttttgtttgctcttttaagcagtctcactgcagtcttatttccaagtaagagtactgggagaatcactaggtaacttattagaaacccaaattgggacaacagtgctttgtaaattgtgttgtcttcagcagtcaatacaaatagatttttgtttttgttgttcctgcagccccagaagaaattaggggttaaagcagacagtcacactggtttggtcagttacaaagtaatttctttgatctggacagaacatttatatcagtttcatgaaatgattggaatattacaataccgttaagatacagtgtaggcatttaactcctcattggcgtggtccatgctgatgattttgcaaaatgagttgtgatgaatcaatgaaaaatgtaatttagaaactgatttcttcagaattagatggcttattttttaaaatatttgaatgaaaacattttatttttaaaatattacacaggaggcttcggagtttcttagtcattactgtccttttcccctacagaattttccctcttggtgtgattgcacagaatttgtatgtattttcagttacaagattgtaagtaaattgcctgatttgttttcattatagacaacgatgaatttcttctaattatttaaataaaatcaccaaaaacataaa

SEQ ID NO: 253 - DNA, 3642 bp, Homo sapiens
cagccgcatctggggtcaatcatactcaccttgcccgggccatgctccagcaaaatcaagctgttttcttttgaaagttcaaactcatcaagattatgctgctcactcttatcattctgttgccagtagtttcaaaatttagttttgttagtctctcagcaccgcagcactggagctgtcctgaaggtactctcgcaggaaatgggaattctacttgtgtgggtcctgcacccttcttaattttctcccatggaaatagtatctttaggattgacacagaaggaaccaattatgagcaattggtggtggatgctggtgtctcagtgatcatggattttcattataatgagaaaagaatctattgggtggatttagaaagacaacttttgcaaagagtttttctgaatgggtcaaggcaagagagagtatgtaatatagagaaaaatgtttctggaatggcaataaattggataaatgaagaagttatttggtcaaatcaacaggaaggaatcattacagtaacagatatgaaaggaaataattcccacattcttttaagtgctttaaaatatcctgcaaatgtagcagttgatccagtagaaaggtttatattttggtcttcagaggtggctggaagcctttatagagcagatctcgatggtgtgggagtgaaggctctgttggagacatcagagaaaataacagctgtgtcattggatgtgcttgataagcggctgttttggattcagtacaacagagaaggaagcaattctcttatttgctcctgtgattatgatggaggttctgtccacattagtaaacatccaacacagcataatttgtttgcaatgtccctttttggtgaccgtatcttctattcaacatggaaaatgaagacaatttggatagccaacaaacacactggaaaggacatggttagaattaacctccattcatcatttgtaccacttggtgaactgaaagtagtgcatccacttgcacaacccaaggcagaagatgacacttgggagcctgagcagaaactttgcaaattgaggaaaggaaactgcagcagcactgtgtgtgggcaagacctccagtcacacttgtgcatgtgtgcagagggatacgccctaagtcgagaccggaagtactgtgaagatgttaatgaatgtgctttttggaatcatggctgtactcttgggtgtaaaaacacccctggatcctattactgcacgtgccctgtaggatttgttctgcttcctgatgggaaacgatgtcatcaacttgtttcctgtccacgcaatgtgtctgaatgcagccatgactgtgttctgacatcagaaggtcccttatgtttctgtcctgaaggctcagtgcttgagagagatgggaaaacatgtagcggttgttcctcacccgataatggtggatgtagccagctctgcgttcctcttagcccagtatcctgggaatgtgattgctttcctgggtatgacctacaactggatgaaaaaagctgtgcagcttcaggaccacaaccatttttgctgtttgccaattctcaagatattcgacacatgcattttgatggaacagactatggaactctgctcagccagcagatgggaatggtttatgccctagatcatgaccctgtggaaaataagatatactttgcccatacagccctgaagtggatagagagagctaatatggatggttcccagcgagaaaggcttattgaggaaggagtagatgtgccagaaggtcttgctgtggactggattggccgtagattctattggacagacagagggaaatctctgattggaaggagtgatttaaatgggaaacgttccaaaataatcactaaggagaacatctctcaaccacgaggaattgctgttcatccaatggccaagagattattctggactgatacagggattaatccacgaattgaaagttcttccctccaaggccttggccgtctggttatagccagctctgatctaatctggcccagtggaataacgattgacttcttaactgacaagttgtactggtgcgatgccaagcagtctgtgattgaaatggccaatctggatggttcaaaacgccgaagacttacccagaatgatgtaggtcacccatttgctgtagcagtgtttgaggattatgtgtggttctcagattgggctatgccatcagtaatgagagtaaacaagaggactggcaaagatagagtacgtctccaaggcagcatgctgaagccctcatcactggttgtggttcatccattggcaaaaccaggagcagatccctgcttatatcaaaacggaggctgtgaacatatttgcaaaaagaggcttggaactgcttggtgttcgtgtcgtgaaggttttatgaaagcctcagatgggaaaacgtgtctggctctggatggtcatcagctgttggcaggtggtgaagttgatctaaagaaccaagtaacaccattggacatcttgtccaagactagagtgtcagaagataacattacagaatctcaacacatgctagtggctgaaatcatggtgtcagatcaagatgactgtgctcctgtgggatgcagcatgtatgctcggtgtatttcagagggagaggatgccacatgtcagtgtttgaaaggatttgctggggatggaaaactatgttctgatatagatgaatgtgagatgggtgtcccagtgtgcccccctgcctcctccaagtgcatcaacaccgaaggtggttatgtctgccggtgctcagaaggctaccaaggagatgggattcactgtcttgactctactccaccccctcacctcagggaagatgaccaccactattccgtaagaaatagtgactctgaatgtcccctgtcccacgatgggtactgcctccatgatggtgtgtgcatgtatattgaagcattggacaagtatgcatgcaactgtgttgttggctacatcggggagcgatgtcagtaccgagacctgaagtggtgggaactgcgccacgctggccacgggcagcagcagaaggtcatcgtggtggctgtctgcgtggtggtgcttgtcatgctgctcctcctgagcctgtggggggcccactactacaggactcagaagctgctatcgaaaaacccaaagaatccttatgaggagtcgagcagagatgtgaggagtcgcaggcctgctgacactgaggatgggatgtcctcttgccctcaaccttggtttgtggttataaaagaacaccaagacctcaagaatgggggtcaaccagtggctggtgaggatggccaggcagcagatgggtcaatgcaaccaacttcatggaggcaggagccccagttatgtggaatgggcacagagcaaggctgctggattccagtatccagtgataagggctcctgtccccaggtaatggagcgaagctttcatatgccctcctatgggacacagacccttgaagggggtgtcgagaagccccattctctcctatcagctaacccattatggcaacaaagggccctggacccaccacaccaaatggagctgactcagtgaaaactggaattaaaaggaaagtcaagaagaatgaactatgtcgatg

SEQ ID NO: 254 - DNA, 1886 bp, Homo sapiens
agagtcacatctcttatttggaccagtatagacagaagtaaacccagctgacttgtttcctgggacagttgagttaagggatggctttcacagagcattcaccgctgacccctcaccgtcgggacctctgtagccgctctatctggctagcaaggaagattcgttcagacctgactgctcttacggaatcctatgtgaagcatcagggcctgaacaagaacatcaacctggactctgcggatgggatgccagtggcaagcactgatcagtggagtgagctgaccgaggcagagcgactccaagagaaccttcaagcttatcgtaccttccatgttttgttggccaggctcttagaagaccagcaggtgcattttaccccaaccgaaggtgacttccatcaagctatacatacccttcttctccaagtcgctgcctttgcataccagatagaggagttaatgatactcctggaatacaagatcccccgcaatgaggctgatgggatgcctattaatgttggagatggtggtctctttgagaagaagctgtggggcctaaaggtgctgcaggagctttcacagtggacagtaaggtccatccatgaccttcgtttcatttcttctcatcagactgggatcccagcacgtgggagccattatattgctaacaacaagaaaatgtagcagttagtcccttctctcttccttgctttctcttctaatggaatatgcgtagttccctggggcctcgctttcccatcttaaatttctaaaaacagttaagacaacaggcattttctttcttttttctctgaccacctgcagcctgttgaaggactacaggtattttcatcaagtagcgttggagacatacacaaatgggcatacaagtttagcctggggggtgtgatttgtgtgcgtgcttgcatgtgctgcaggtgtaagagagtgggagcagggacaacgtccttccacttcagggttctaacctttctaacccactaagtaacctctacaggcatttaactgccttacagacagaatatacatatgttaattctagtcctggatgactcggtctgagaagattcaatttaaaatcagactctttagttgatttaaactcttagagaataagaataataatggctaacttttattatcttctatattaaggcagtatgccaagggtctttatgtatattatgtacagcgtttacaaccttgtgagcaaggtggtgttactcccattaggtagatgagaaaacaggctcacagagatttggttaagctcacacagctaacaagtagcacactgagtttgaacacagatcattctccttgtaaaagcctatgtgcctttcactttagaggcttgatcatgaatcactgcacctctttgtcacagggtgttggaagatgcatccatgtaatctattcccatcgctggaaaacagctgctgttagatgtcctcagaagtcagttgcaaattttagcgttaaagtcaggatttattgttcatacttggcggtgaggagggcagctggagatcttaagattccattttggaaaatgattaggcccgccaaacttctgaactttggaagctggggatgtttagtaatacagcctggtttttaagtactcactaaaagttctcaaatattgggttgggcacggcttataccaggttacctcacttttaattagtgatgcaggcagtgtaacccaagcatttgtggacaatgagtggaatactaaagttaaaaagtcaaactttcacctcagattttctggacttagtcatgaggagagggtgaggcccactctgttcctactggagataccagagactctgaaactatagaataaagcctctgtgctgc

SEQ ID NO: 255 - DNA, 1047 bp, Homo sapiens
agagagcgctgggagccggaggggagcgcagcgagttttggccagtggtcgtgcagtccaaggggctggatggcatgctggacccaagctcagctcagcgtccggacccaataacagttttaccaagggagcagctttctatcctggccacactgaggtgcatagcgtaatgtccatgttgttctacactctgatcacagcttttctgatcggcatacaggcggaaccacactcagagagcaatgtccctgcaggacacaccatcccccaagcccactggactaaacttcagcattcccttgacactgcccttcgcagagcccgcagcgccccggcagcggcgatagctgcacgcgtggcggggcagacccgcaacattactgtggaccccaggctgtttaaaaagcggcgactccgttcaccccgtgtgctgtttagcacccagcctccccgtgaagctgcagacactcaggatctggacttcgaggtcggtggtgctgcccccttcaacaggactcacaggagcaagcggtcatcatcccatcccatcttccacaggggcgaattctcggtgtgtgacagtgtcagcgtgtgggttggggataagaccaccgccacagacatcaagggcaaggaggtgatggtgttgggagaggtgaacattaacaacagtgtattcaaacagtacttttttgagaccaagtgccgggacccaaatcccgttgacagcgggtgccggggcattgactcaaagcactggaactcatattgtaccacgactcacacctttgtcaaggcgctgaccatggatggcaagcaggctgcctggcggtttatccggatagatacggcctgtgtgtgtgtgctcagcaggaaggctgtgagaagagcctgacctgccgacacgctccctccccctgccccttctacactctcctgggcccctccctacctcaacctgtaaattattttaaattataaggactgcatggtaatttatagtttatacagttttaaagaatcattatttattaaatttttggaagc

SEQ ID NO: 256 - DNA, 4454 bp, Homo sapiens
gcgaggcagccagcgagggagagagcgagcgggcgagccggagcgaggaagggaaagcgcaagagagagcgcacacgcacacacccgccgcgcgcactcgcgcacggacccgcacggggacagctcggaagtcatcagttccatgggcgagatgctgctgctggcgagatgtctgctgctagtcctcgtctcctcgctgctggtatgctcgggactggcgtgcggaccgggcagggggttcgggaagaggaggcaccccaaaaagctgacccctttagcctacaagcagtttatccccaatgtggccgagaagaccctaggcgccagcggaaggtatgaagggaagatctccagaaactccgagcgatttaaggaactcacccccaattacaaccccgacatcatatttaaggatgaagaaaacaccggagcggacaggctgatgactcagaggtgtaaggacaagttgaacgctttggccatctcggtgatgaaccagtggccaggagtgaaactgcgggtgaccgagggctgggacgaagatggccaccactcagaggagtctctgcactacgagggccgcgcagtggacatcaccacgtctgaccgcgaccgcagcaagtacggcatgctggcccgcctggcggtggaggccggcttcgactgggtgtactacgagtccaaggcacatatccactgctcggtgaaagcagagaactcggtggcggccaaatcgggaggctgcttcccgggctcggccacggtgcacctggagcagggcggcaccaagctggtgaaggacctgagccccggggaccgcgtgctggcggcggacgaccagggccggctgctctacagcgacttcctcactttcctggaccgcgacgacggcgccaagaaggtcttctacgtgatcgagacgcgggagccgcgcgagcgcctgctgctcaccgccgcgcacctgctctttgtggcgccgcacaacgactcggccaccggggagcccgaggcgtcctcgggctcggggccgccttccgggggcgcactggggcctcgggcgctgttcgccagccgcgtgcgcccgggccagcgcgtgtacgtggtggccgagcgtgacggggaccgccggctcctgcccgccgctgtgcacagcgtgaccctaagcgaggaggccgcgggcgcctacgcgccgctcacggcccagggcaccattctcatcaaccgggtgctggcctcgtgctacgcggtcatcgaggagcacagctgggcgcaccgggccttcgcgcccttccgcctggcgcacgcgctcctggctgcactggcgcccgcgcgcacggaccgcggcggggacagcggcggcggggaccgcgggggcggcggcggcagagtagccctaaccgctccaggtgctgccgacgctccgggtgcgggggccaccgcgggcatccactggtactcgcagctgctctaccaaataggcacctggctcctggacagcgaggccctgcacccgctgggcatggcggtcaagtccagctgaagccggggggccgggggaggggcgcgggagggggcggggcggggcagcaacagcaacgcaaagcaaaaagacactcggaaaaggcgcacgaaccagactgagttataataagaataagaataataaagtaggacagtccaaagtagactctaaggaaacaaggaccccgggaagttttgttgttgtgcttagttgatatatattttttgaatttttttggttattgttttattttggttattttttcctcctctcctggctatttatttgtttggtatgaatagatgttttaaataatatgaaccggaccttcaagagccttaaatagtttgtttcttggataatttattatgatcatgtgaactgtactcacgggggaaagattattttgtgaggccaagcaacctgctcagagtctatttttctacatgtccctcgtcccggctgtcagaaagcaaacctctgtccccgccatccctcccttccatctcctgcttctcagcaagtgcaaactcaaacgtgcttcatgggggtccacaaattatatttttatacacagaattgtaaattagattttttgagagatcaatacttaactgaattacatttcatttttgaaatagtgtaaaatatgaaaatatattattttaatttaactagtttccgatgtaacagccatctcctctgttgtctttatggtttcatattccctttgtattcaccattttgccacattcttggaagccaagactgttacacacacaacatacacacacacttttctttttcttttcttttcttttttttttttttttttttttttggacaaactggaagaactgttatttttaacttcaaagaatttattagaaaataatattttttaaaagcgcacatagtgacgagcccacgaggatggagcctgcagtttgtacagagaaaacaaaggatgtttttgcattaataaattgagaaataacgctgtaaatttactaaaatgtatttttgaatattttgtaatagttttatagaaataaaatgtgccatgcacagaacgcttagtatctaataactaagaattcctgttgcagccctttttcttttagtttttggcttctttgtttgggaaacctagcgctgacaggagctcccaatattctatttagatgtgttgcttatactgtgaactcagactgactgacttaggtaaccaaagtaggcacacaaaccaacttgtttcttctcatggctggagaaacctcagctctgtttgtatttattgtgtgaagctctttctacactcccaaaggttgggagtgccattcgtggggactgtgctgtccccctcaccccaccccttaactagcaaagcctgatgtgtaagcccagaggaggtggcctggggatggccaccaacaaccttctcttaggactcctgtgtgtggttgctgggcagacccctggcctgaccctgtttgtgcttctctgatctgtagggaggaggctcattgctgctttctgaggtcctgttgtgtcccttccagaaagcatccttagaagagaggacccggtttgatcttctctgaagctcctatcctcttttcttgagggtccccttaaatctgagtggcaagcccacagtggcgagggccagtcgctggaatgtcggggctgctgttgaggtcctcaggctacactggttgtctgtgtcacatggcggtcgggcgtggactttgatccctgttgagagagcatgctgctgtgggcgctgggctggggaaggtccttccatgcttcatgctgccttggaggtttggccaagagggtctctgcccttggcggttgtcagggtcccaggtggaggactactcccagttctttggcttacggaaggtgtctgccatgctttgtgctttgggccgaatcgtctgagcaggctgggccttggaagagttgcgctgcatgagcttggggcctcccagcagctgcagcctgtgtagaaggtggtccaggcttagggaacaggagtgaacagacttcagccccacctggcaggggctggctcccgaggttgggcccagtccctgagggtctgctctgctacgggtctgcccttgagtggccttccgtggagggtgtgtgaccaggtggatggcgcagggcctctggagccctctcctcaggagcagtcctcagcctttttctgtaaaagacttttctttggtgttctaggtggtcagcaggttccaggctggtgtttacaatctcggaggaagtgcgatggtttctgttcttttgacagttcagtctgatttcaagtcagtcgaaagcgaaccagaagcaccgggcacagcagctcctctggctgtgtagacagacctggcaatgtggccgtgcagcccagacgatcagagagaagccaggcgttgaccaagccccaaggtgcctgaggccatggtgcaactctgctggtgactggggcaccttggagcagagcttcacccggatgggaaatcctcactcctgggtggcactccctcctggacaggcccggtggcagagtgtccgtgctgctgggtgctgtccccagccctcctggtccatcttcttaagatgcgtccactgctttatatttaaaattctctttttcacaggcaaggaaaggaaaccactgcttagagacactaggtacagggcatcaagagggtgcagcccagccccgccaggacgaggcgccgacttctcattcagggttgacggagccaagagtttgtgcaaaatgtatgcatggtggttgctgccagcctccctcatgactaaatgcatatctattcctgtcaaaacgtgtatcacaatgtacttgaaactgttatctttgtgctctattgtttgaataattaaagaaattacagag

SEQ ID NO: 257 - DNA, 799 bp, Homo sapiens
gcggcggcccgcgggacggcgtgacccgccgggctctcggtgccccggggccgcgcgccatgggcagcccccgctccgcgctgagctgcctgctgttgcacttgctggtcctctgcctccaagcccaggaaggcccgggcaggggccctgcgctgggcagggagctcgcttccctgttccgggctggccgggagccccagggtgtctcccaacaggtaactgttcagtcctcacctaattttacacagcatgtgagggagcagagcctggtgacggatcagctcagccgccgcctcatccggacctaccaactctacagccgcaccagcgggaagcacgtgcaggtcctggccaacaagcgcatcaacgccatggcagaggacggcgaccccttcgcaaagctcatcgtggagacggacacctttggaagcagagttcgagtccgaggagccgagacgggcctctacatctgcatgaacaagaaggggaagctgatcgccaagagcaacggcaaaggcaaggactgcgtcttcacggagattgtgctggagaacaactacacagcgctgcagaatgccaagtacgagggctggtacatggccttcacccgcaagggccggccccgcaagggctccaagacgcggcagcaccagcgtgaggtccacttcatgaagcggctgccccggggccaccacaccaccgagcagagcctgcgcttcgagttcctcaactacccgcccttcacgcgcagcctgcgcggcagccagaggacttgggcccccgagccccgataggtgct

SEQ ID NO: 258 - DNA, 707 bp, Homo sapiens
atgggcagcccccgctccgcgctgagctgcctgctgttgcacttgctggtcctctgcctccaagcccaggaaggcccgggcaggggccctgcgctgggcagggagctcgcttccctgttccgggctggccgggagccccagggtgtctcccaacagcatgtgagggagcagagcctggtgacggatcagctcagccgccgcctcatccggacctaccaactctacagccgcaccagcgggaagcacgtgcaggtcctggccaacaagcgcatcaacgccatggcagaggacggcgaccccttcgcaaagctcatcgtggagacggacacctttggaagcagagttcgagtccgaggagccgagacgggcctctacatctgcatgaacaagaaggggaagctgatcgccaagagcaacggcaaaggcaaggactgcgtcttcacggagattgtgctggagaacaactacacagcgctgcagaatgccaagtacgagggctggtacatggccttcacccgcaagggccggccccgcaagggctccaagacgcggcagcaccagcgtgaggtccacttcatgaagcggctgccccggggccaccacaccaccgagcagagcctgcgcttcgagttcctcaactacccgcccttcacgcgcagcctgcgcggcagccagaggacttgggcccccgagccccgataggtgct

SEQ ID NO: 259 - DNA, 823 bp, Homo sapiens
gcggcgcggcgagcacgacgttccacgggacccgcggagccgcgtcgtgatcgccgccggcctcccgcacccgcaccctctccgctcgcgccctgctcagcgcgtcctcccgcggcggcccgcgggacggcgtgacccgccgggctctcggtgccccggggccgcgcgccatgggcagcccccgctccgcgctgagctgcctgctgttgcacttgctggtcctctgcctccaagcccaggtaactgttcagtcctcacctaattttacacagcatgtgagggagcagagcctggtgacggatcagctcagccgccgcctcatccggacctaccaactctacagccgcaccagcgggaagcacgtgcaggtcctggccaacaagcgcatcaacgccatggcagaggacggcgaccccttcgcaaagctcatcgtggagacggacacctttggaagcagagttcgagtccgaggagccgagacgggcctctacatctgcatgaacaagaaggggaagctgatcgccaagagcaacggcaaaggcaaggactgcgtcttcacggagattgtgctggagaacaactacacagcgctgcagaatgccaagtacgagggctggtacatggccttcacccgcaagggccggccccgcaagggctccaagacgcggcagcaccagcgtgaggtccacttcatgaagcggctgccccggggccaccacaccaccgagcagagcctgcgcttcgagttcctcaactacccgcccttcacgcgcagcctgcgcggcagccagaggacttgggcccccgagccccgataggtgct

SEQ ID NO: 260 - DNA, 694 bp, Homo sapiens
tcagcgcgtcctcccgcggcggcccgcgggacggcgtgacccgccgggctctcggtgccccggggccgcgcgccatgggcagcccccgctccgcgctgagctgcctgctgttgcacttgctggtcctctgcctccaagcccagcatgtgagggagcagagcctggtgacggatcagctcagccgccgcctcatccggacctaccaactctacagccgcaccagcgggaagcacgtgcaggtcctggccaacaagcgcatcaacgccatggcagaggacggcgaccccttcgcaaagctcatcgtggagacggacacctttggaagcagagttcgagtccgaggagccgagacgggcctctacatctgcatgaacaagaaggggaagctgatcgccaagagcaacggcaaaggcaaggactgcgtcttcacggagattgtgctggagaacaactacacagcgctgcagaatgccaagtacgagggctggtacatggccttcacccgcaagggccggccccgcaagggctccaagacgcggcagcaccagcgtgaggtccacttcatgaagcggctgccccggggccaccacaccaccgagcagagcctgcgcttcgagttcctcaactacccgcccttcacgcgcagcctgcgcggcagccagaggacttgggcccccgagccccgataggtgct

SEQ ID NO: 261 - DNA, 4310 bp, Homo sapiens
gtcagctgtgccccggtcgccgagtggcgaggaggtgacggtagccgccttcctatttccgcccggcgggcagcgctgcggggcgagtgccagcagagaggcgctcggtcctccctccgccctcccgcgccgggggcaggccctgcctagtctgcgtctttttcccccgcaccgcggcgccgctccgccactcgggcaccgcaggtagggcaggaggctggagagcctgctgcccgcccgcccgtaaaatggtcccctcggctggacagctcgccctgttcgctctgggtattgtgttggctgcgtgccaggccttggagaacagcacgtccccgctgagtgcagacccgcccgtggctgcagcagtggtgtcccattttaatgactgcccagattcccacactcagttctgcttccatggaacctgcaggtttttggtgcaggaggacaagccagcatgtgtctgccattctgggtacgttggtgcacgctgtgagcatgcggacctcctggccgtggtggctgccagccagaagaagcaggccatcaccgccttggtggtggtctccatcgtggccctggctgtccttatcatcacatgtgtgctgatacactgctgccaggtccgaaaacactgtgagtggtgccgggccctcatctgccggcacgagaagcccagcgccctcctgaagggaagaaccgcttgctgccactcagaaacagtggtctgaagagcccagaggaggagtttggccaggtggactgtggcagatcaataaagaaaggcttcttcaggacagcactgccagagatgcctgggtgtgccacagaccttcctacttggcctgtaatcacctgtgcagccttttgtgggccttcaaaactctgtcaagaactccgtctgcttggggttattcagtgtgacctagagaagaaatcagcggaccacgatttcaagacttgttaaaaaagaactgcaaagagacggactcctgttcacctaggtgaggtgtgtgcagcagttggtgtctgagtccacatgtgtgcagttgtcttctgccagccatggattccaggctatatatttctttttaatgggccacctccccacaacagaattctgcccaacacaggagatttctatagttattgttttctgtcatttgcctactggggaagaaagtgaaggaggggaaactgtttaatatcacatgaagaccctagctttaagagaagctgtatcctctaaccacgagaccctcaaccagcccaacatcttccatggacacatgacattgaagaccatcccaagctatcgccacccttggagatgatgtcttatttattagatggataatggttttatttttaatctcttaagtcaatgtaaaaagtataaaaccccttcagacttctacattaatgatgtatgtgttgctgactgaaaagctatactgattagaaatgtctggcctcttcaagacagctaaggcttgggaaaagtcttccagggtgcggagatggaaccagaggctgggttactggtaggaataaaggtaggggttcagaaatggtgccattgaagccacaaagccggtaaatgcctcaatacgttctgggagaaaacttagcaaatccatcagcagggatctgtcccctctgttggggagagaggaagagtgtgtgtgtctacacaggataaacccaatacatattgtactgctcagtgattaaatgggttcacttcctcgtgagccctcggtaagtatgtttagaaatagaacattagccacgagccataggcatttcaggccaaatccatgaaagggggaccagtcatttattttccattttgttgcttggttggtttgttgctttatttttaaaaggagaagtttaactttgctatttattttcgagcactaggaaaactattccagtaatttttttttcctcatttccattcaggatgccggctttattaacaaaaactctaacaagtcacctccactatgtgggtcttcctttcccctcaagagaaggagcaattgttcccctgagcatctgggtccatctgacccatggggcctgcctgtgagaaacagtgggtcccttcaaatacatagtggatagctcatccctaggaattttcattaaaatttggaaacagagtaatgaagaaataatatataaactccttatgtgaggaaatgctactaatatctgaaaagtgaaagatttctatgtattaactcttaagtgcacctagcttattacatcgtgaaaggtacatttaaaatatgttaaattggcttgaaattttcagagaattttgtcttcccctaattcttcttccttggtctggaagaacaatttctatgaattttctctttatttttttttataattcagacaattctatgacccgtgtcttcatttttggcactcttatttaacaatgccacacctgaagcacttggatctgttcagagctgaccccctagcaacgtagttgacacagctccaggtttttaaattactaaaataagttcaagtttacatcccttgggccagatatgtgggttgaggcttgactgtagcatcctgcttagagaccaatcaacggacactggtttttagacctctatcaatcagtagttagcatccaagagactttgcagaggcgtaggaatgaggctggacagatggcggaagcagaggttccctgcgaagacttgagatttagtgtctgtgaatgttctagttcctaggtccagcaagtcacacctgccagtgccctcatccttatgcctgtaacacacatgcagtgagaggcctcacatatacgcctccctagaagtgccttccaagtcagtcctttggaaaccagcaggtctgaaaaagaggctgcatcaatgcaagcctggttggaccattgtccatgcctcaggatagaacagcctggcttatttggggatttttcttctagaaatcaaatgactgataagcattggatccctctgccatttaatggcaatggtagtctttggttagctgcaaaaatactccatttcaagttaaaaatgcatcttctaatccatctctgcaagctccctgtgtttccttgccctttagaaaatgaattgttcactacaattagagaatcatttaacatcctgacctggtaagctgccacacacctggcagtggggagcatcgctgtttccaatggctcaggagacaatgaaaagcccccatttaaaaaaataacaaacattttttaaaaggcctccaatactcttatggagcctggatttttcccactgctctacaggctgtgactttttttaagcatcctgacaggaaatgttttcttctacatggaaagatagacagcagccaaccctgatctggaagacagggccccggctggacacacgtggaaccaagccagggatgggctggccattgtgtccccgcaggagagatgggcagaatggccctagagttcttttccctgagaaaggagaaaaagatgggattgccactcacccacccacactggtaagggaggagaatttgtgcttctggagcttctcaagggattgtgttttgcaggtacagaaaactgcctgttatcttcaagccaggttttcgagggcacatgggtcaccagttgctttttcagtcaatttggccgggatggactaatgaggctctaacactgctcaggagacccctgccctctagttggttctgggctttgatctcttccaacctgcccagtcacagaaggaggaatgactcaaatgcccaaaaccaagaacacattgcagaagtaagacaaacatgtatatttttaaatgttctaacataagacctgttctctctagccattgatttaccaggctttctgaaagatctagtggttcacacagagagagagagagtactgaaaaagcaactcctcttcttagtcttaataatttactaaaatggtcaacttttcattatctttattataataaacctgatgcttttttttagaactccttactctgatgtctgtatatgttgcactgaaaaggttaatatttaatgttttaatttattttgtgtggtaagttaattttgatttctgtaatgtgttaatgtgattagcagttattttccttaatatctgaattatacttaaagagtagtgagcaatataagacgcaattgtgtttttcagtaatgtgcattgttattgagttgtactgtaccttatttggaaggatgaaggaatgaatctttttttcctaaatcaa

SEQ ID NO: 262 - DNA, 1225 bp, Homo sapiens
actcgggcaccgcaggtagggcaggaggctggagagcctgctgcccgcccgcccgtaaaatggtcccctcggctggacagctcgccctgttcgctctgggtattgtgttggctgcgtgccaggccttggagaacagcacgtccccgctgagtgacccgcccgtggctgcagcagtggtgtcccattttaatgactgcccagattcccacactcagttctgcttccatggaacctgcaggtttttggtgcaggaggacaagccagcatgtgtctgccattctgggtacgttggtgcacgctgtgagcatgcggacctcctggccgtggtggctgccagccagaagaagcaggccatcaccgccttggtggtggtctccatcgtggccctggctgtccttatcatcacatgtgtgctgatacactgctgccaggtccgaaaacactgtgagtggtgccgggccctcatctgccggcacgagaagcccagcgccctcctgaagggaagaaccgcttgctgccactcagaaacagtggtctgaagagcccagaggaggagtttggccaggtggactgtggcagatcaataaagaaaggcttcttcaggacagcactgccagagatgcctgggtgtgccacagaccttcctacttggcctgtaatcacctgtgcagccttttgtgggccttcaaaactctgtcaagaactccgtctgcttggggttattcagtgtgacctagagaagaaatcagcggaccacgatttcaagacttgttaaaaaagaactgcaaagagacggactcctgttcacctaggtgaggtgtgtgcagcagttggtgtctgagtccacatgtgtgcagttgtcttctgccagccatggattccaggctatatatttctttttaatgggccacctccccacaacagaattctgcccaacacaggagatttctatagttattgttttctgtcatttgcctactggggaagaaagtgaaggaggggaaactgtttaatatcacatgaagaccctagctttaagagaagctgtatcctctaaccacgagaccctcaaccagcccaacatcttccatggacacatgacattgaagaccatcccaagctatcgccacccttggagatgatgtcttatttattagatggataatggttttatttttaatctcttaagtcaatgtaaaaagtataaaaccccttcagacttcta

SEQ ID NO: 263 - DNA, 2199 bp, Homo sapiens
ccccgccgccgccgcccttcgcgccctgggccatctccctcccacctccctccgcggagcagccagacagcgagggccccggccgggggcaggggggacgccccgtccggggcacccccccggctctgagccgcccgcggggccggcctcggcccggagcggaggaaggagtcgccgaggagcagcctgaggccccagagtctgagacgagccgccgccgcccccgccactgcggggaggagggggaggaggagcgggaggagggacgagctggtcgggagaagaggaaaaaaacttttgagacttttccgttgccgctgggagccggaggcgcggggacctcttggcgcgacgctgccccgcgaggaggcaggacttggggaccccagaccgcctccctttgccgccggggacgcttgctccctccctgccccctacacggcgtccctcaggcgcccccattccggaccagccctcgggagtcgccgacccggcctcccgcaaagacttttccccagacctcgggcgcaccccctgcacgccgccttcatccccggcctgtctcctgagcccccgcgcatcctagaccctttctcctccaggagacggatctctctccgacctgccacagatcccctattcaagaccacccaccttctggtaccagatcgcgcccatctaggttatttccgtgggatactgagacacccccggtccaagcctcccctccaccactgcgcccttctccctgaggacctcagctttccctcgaggccctcctaccttttgccgggagacccccagcccctgcaggggcggggcctccccaccacaccagccctgttcgcgctctcggcagtgccggggggcgccgcctcccccatgccgccctccgggctgcggctgctgccgctgctgctaccgctgctgtggctactggtgctgacgcctggccggccggccgcgggactatccacctgcaagactatcgacatggagctggtgaagcggaagcgcatcgaggccatccgcggccagatcctgtccaagctgcggctcgccagccccccgagccagggggaggtgccgcccggcccgctgcccgaggccgtgctcgccctgtacaacagcacccgcgaccgggtggccggggagagtgcagaaccggagcccgagcctgaggccgactactacgccaaggaggtcacccgcgtgctaatggtggaaacccacaacgaaatctatgacaagttcaagcagagtacacacagcatatatatgttcttcaacacatcagagctccgagaagcggtacctgaacccgtgttgctctcccgggcagagctgcgtctgctgaggctcaagttaaaagtggagcagcacgtggagctgtaccagaaatacagcaacaattcctggcgatacctcagcaaccggctgctggcacccagcgactcgccagagtggttatcttttgatgtcaccggagttgtgcggcagtggttgagccgtggaggggaaattgagggctttcgccttagcgcccactgctcctgtgacagcagggataacacactgcaagtggacatcaacgggttcactaccggccgccgaggtgacctggccaccattcatggcatgaaccggcctttcctgcttctcatggccaccccgctggagagggcccagcatctgcaaagctcccggcaccgccgagccctggacaccaactattgcttcagctccacggagaagaactgctgcgtgcggcagctgtacattgacttccgcaaggacctcggctggaagtggatccacgagcccaagggctaccatgccaacttctgcctcgggccctgcccctacatttggagcctggacacgcagtacagcaaggtcctggccctgtacaaccagcataacccgggcgcctcggcggcgccgtgctgcgtgccgcaggcgctggagccgctgcccatcgtgtactacgtgggccgcaagcccaaggtggagcagctgtccaacatgatcgtgcgctcctgcaagtgcagctgaggtcccgccccgccccgccccgccccggcaggcccggccccaccccgccccgcccccgctgccttgcccatgggggctgtatttaaggacacccgtgccccaagcccacctggggccccattaaagatggagagaggactgcgg

SEQ ID NO: 264 - DNA, 4969 bp, Homo sapiens
gcccctcccgtcagttcgccagctgccagccccgggaccttttcatctcttcccttttggccggaggagccgagttcagatccgccactccgcacccgagactgacacactgaactccacttcctcctcttaaatttatttctacttaatagccactcgtctctttttttccccatctcattgctccaagaatttttttcttcttactcgccaaagtcagggttccctctgcccgtcccgtattaatatttccacttttggaactactggccttttctttttaaaggaattcaagcaggatacgtttttctgttgggcattgactagattgtttgcaaaagtttcgcatcaaaaacaacaacaacaaaaaaccaaacaactctccttgatctatactttgagaattgttgatttcttttttttattctgacttttaaaaacaacttttttttccacttttttaaaaaatgcactactgtgtgctgagcgcttttctgatcctgcatctggtcacggtcgcgctcagcctgtctacctgcagcacactcgatatggaccagttcatgcgcaagaggatcgaggcgatccgcgggcagatcctgagcaagctgaagctcaccagtcccccagaagactatcctgagcccgaggaagtccccccggaggtgatttccatctacaacagcaccagggacttgctccaggagaaggcgagccggagggcggccgcctgcgagcgcgagaggagcgacgaagagtactacgccaaggaggtttacaaaatagacatgccgcccttcttcccctccgaaaatgccatcccgcccactttctacagaccctacttcagaattgttcgatttgacgtctcagcaatggagaagaatgcttccaatttggtgaaagcagagttcagagtctttcgtttgcagaacccaaaagccagagtgcctgaacaacggattgagctatatcagattctcaagtccaaagatttaacatctccaacccagcgctacatcgacagcaaagttgtgaaaacaagagcagaaggcgaatggctctccttcgatgtaactgatgctgttcatgaatggcttcaccataaagacaggaacctgggatttaaaataagcttacactgtccctgctgcacttttgtaccatctaataattacatcatcccaaataaaagtgaagaactagaagcaagatttgcaggtattgatggcacctccacatataccagtggtgatcagaaaactataaagtccactaggaaaaaaaacagtgggaagaccccacatctcctgctaatgttattgccctcctacagacttgagtcacaacagaccaaccggcggaagaagcgtgctttggatgcggcctattgctttagaaatgtgcaggataattgctgcctacgtccactttacattgatttcaagagggatctagggtggaaatggatacacgaacccaaagggtacaatgccaacttctgtgctggagcatgcccgtatttatggagttcagacactcagcacagcagggtcctgagcttatataataccataaatccagaagcatctgcttctccttgctgcgtgtcccaagatttagaacctctaaccattctctactacattggcaaaacacccaagattgaacagctttctaatatgattgtaaagtcttgcaaatgcagctaaaattcttggaaaagtggcaagaccaaaatgacaatgatgatgataatgatgatgacgacgacaacgatgatgcttgtaacaagaaaacataagagagccttggttcatcagtgttaaaaaatttttgaaaaggcggtactagttcagacactttggaagtttgtgttctgtttgttaaaactggcatctgacacaaaaaaagttgaaggccttattctacatttcacctactttgtaagtgagagagacaagaagcaaattttttttaaagaaaaaaataaacactggaagaatttattagtgttaattatgtgaacaacgacaacaacaacaacaacaacaaacaggaaaatcccattaagtggagttgctgtacgtaccgttcctatcccgcgcctcacttgatttttctgtattgctatgcaataggcacccttcccattcttactcttagagttaacagtgagttatttattgtgtgttactatataatgaacgtttcattgcccttggaaaataaaacaggtgtataaagtggagaccaaatactttgccagaaactcatggatggcttaaggaacttgaactcaaacgagccagaaaaaaagaggtcatattaatgggatgaaaacccaagtgagttattatatgaccgagaaagtctgcattaagataaagaccctgaaaacacatgttatgtatcagctgcctaaggaagcttcttgtaaggtccaaaaactaaaaagactgttaataaaagaaactttcagtcagaataagtctgtaagtttttttttttctttttaattgtaaatggttctttgtcagtttagtaaaccagtgaaatgttgaaatgttttgacatgtactggtcaaacttcagaccttaaaatattgctgtatagctatgctataggttttttcctttgttttggtatatgtaaccatacctatattattaaaatagatggatatagaagccagcataattgaaaacacatctgcagatctcttttgcaaactattaaatcaaaacattaactactttatgtgtaatgtgtaaatttttaccatattttttatattctgtaataatgtcaactatgatttagattgacttaaatttgggctctttttaatgatcactcacaaatgtatgtttcttttagctggccagtacttttgagtaaagcccctatagtttgacttgcactacaaatgcattttttttttaataacatttgccctacttgtgctttgtgtttctttcattattatgacataagctacctgggtccacttgtcttttcttttttttgtttcacagaaaagatgggttcgagttcagtggtcttcatcttccaagcatcattactaaccaagtcagacgttaacaaatttttatgttaggaaaaggaggaatgttatagatacatagaaaattgaagtaaaatgttttcattttagcaaggatttagggttctaactaaaactcagaatctttattgagttaagaaaagtttctctaccttggtttaatcaatatttttgtaaaatcctattgttattacaaagaggacacttcataggaaacatctttttctttagtcaggtttttaatattcagggggaaattgaaagatatatattttagtcgatttttcaaaaggggaaaaaagtccaggtcagcataagtcattttgtgtatttcactgaagttataaggtttttataaatgttctttgaaggggaaaaggcacaagccaatttttcctatgatcaaaaaattctttctttcctctgagtgagagttatctatatctgaggctaaagtttaccttgctttaataaataatttgccacatcattgcagaagaggtatcctcatgctggggttaatagaatatgtcagtttatcacttgtcgcttatttagctttaaaataaaaattaataggcaaagcaatggaatatttgcagtttcacctaaagagcagcataaggaggcgggaatccaaagtgaagttgtttgatatggtctacttcttttttggaatttcctgaccattaattaaagaattggatttgcaagtttgaaaactggaaaagcaagagatgggatgccataatagtaaacagcccttgtgttggatgtaacccaatcccagatttgagtgtgtgttgattatttttttgtcttccacttttctattatgtgtaaatcacttttatttctgcagacattttcctctcagataggatgacattttgttttgtattattttgtctttcctcatgaatgcactgataatattttaaatgctctattttaagatctcttgaatctgttttttttttttttaatttgggggttctgtaaggtctttatttcccataagtaaatattgccatgggaggggggtggaggtggcaaggaaggggtgaagtgctagtatgcaagtgggcagcaattatttttgtgttaatcagcagtacaatttgatcgttggcatggttaaaaaatggaatataagattagctgttttgtattttgatgaccaattacgctgtattttaacacgatgtatgtctgtttttgtggtgctctagtggtaaataaattatttcgatgatatgtggatgtctttttcctatcagtaccatcatcgagtctagaaaacacctgtgatgcaataagactatctcaagctggaaaagtcataccacctttccgattgccctctgtgctttctcccttaaggacagtcacttcagaagtcatgctttaaagcacaagagtcaggccatatccatcaaggatagaagaaatccctgtgccgtctttttattcccttatttattgctatttggtaattgtttgagatttagtttccatccagcttgactgccgaccagaaaaaatgcagagagatgtttgcaccatgctttggctttctggttctatgttctgccaacgccagggccaaaagaactggtctagacagtatcccctgtagccccataacttggatagttgctgagccagccagatataacaagagccacgtgctttctggggttggttgtttgggatcagctacttgcctgtcagtttcactggtaccactgcaccacaaacaaaaaaacccaccctatttcctccaatttttttggctgctacctacaagaccagactcctcaaacgagttgccaatctcttaataaataggattaataaaaaaagtaattgtgactcaa

SEQ ID NO: 265 - DNA, 5053 bp, Homo sapiens
gcccctcccgtcagttcgccagctgccagccccgggaccttttcatctcttcccttttggccggaggagccgagttcagatccgccactccgcacccgagactgacacactgaactccacttcctcctcttaaatttatttctacttaatagccactcgtctctttttttccccatctcattgctccaagaatttttttcttcttactcgccaaagtcagggttccctctgcccgtcccgtattaatatttccacttttggaactactggccttttctttttaaaggaattcaagcaggatacgtttttctgttgggcattgactagattgtttgcaaaagtttcgcatcaaaaacaacaacaacaaaaaaccaaacaactctccttgatctatactttgagaattgttgatttcttttttttattctgacttttaaaaacaacttttttttccacttttttaaaaaatgcactactgtgtgctgagcgcttttctgatcctgcatctggtcacggtcgcgctcagcctgtctacctgcagcacactcgatatggaccagttcatgcgcaagaggatcgaggcgatccgcgggcagatcctgagcaagctgaagctcaccagtcccccagaagactatcctgagcccgaggaagtccccccggaggtgatttccatctacaacagcaccagggacttgctccaggagaaggcgagccggagggcggccgcctgcgagcgcgagaggagcgacgaagagtactacgccaaggaggtttacaaaatagacatgccgcccttcttcccctccgaaactgtctgcccagttgttacaacaccctctggctcagtgggcagcttgtgctccagacagtcccaggtgctctgtgggtaccttgatgccatcccgcccactttctacagaccctacttcagaattgttcgatttgacgtctcagcaatggagaagaatgcttccaatttggtgaaagcagagttcagagtctttcgtttgcagaacccaaaagccagagtgcctgaacaacggattgagctatatcagattctcaagtccaaagatttaacatctccaacccagcgctacatcgacagcaaagttgtgaaaacaagagcagaaggcgaatggctctccttcgatgtaactgatgctgttcatgaatggcttcaccataaagacaggaacctgggatttaaaataagcttacactgtccctgctgcacttttgtaccatctaataattacatcatcccaaataaaagtgaagaactagaagcaagatttgcaggtattgatggcacctccacatataccagtggtgatcagaaaactataaagtccactaggaaaaaaaacagtgggaagaccccacatctcctgctaatgttattgccctcctacagacttgagtcacaacagaccaaccggcggaagaagcgtgctttggatgcggcctattgctttagaaatgtgcaggataattgctgcctacgtccactttacattgatttcaagagggatctagggtggaaatggatacacgaacccaaagggtacaatgccaacttctgtgctggagcatgcccgtatttatggagttcagacactcagcacagcagggtcctgagcttatataataccataaatccagaagcatctgcttctccttgctgcgtgtcccaagatttagaacctctaaccattctctactacattggcaaaacacccaagattgaacagctttctaatatgattgtaaagtcttgcaaatgcagctaaaattcttggaaaagtggcaagaccaaaatgacaatgatgatgataatgatgatgacgacgacaacgatgatgcttgtaacaagaaaacataagagagccttggttcatcagtgttaaaaaatttttgaaaaggcggtactagttcagacactttggaagtttgtgttctgtttgttaaaactggcatctgacacaaaaaaagttgaaggccttattctacatttcacctactttgtaagtgagagagacaagaagcaaattttttttaaagaaaaaaataaacactggaagaatttattagtgttaattatgtgaacaacgacaacaacaacaacaacaacaaacaggaaaatcccattaagtggagttgctgtacgtaccgttcctatcccgcgcctcacttgatttttctgtattgctatgcaataggcacccttcccattcttactcttagagttaacagtgagttatttattgtgtgttactatataatgaacgtttcattgcccttggaaaataaaacaggtgtataaagtggagaccaaatactttgccagaaactcatggatggcttaaggaacttgaactcaaacgagccagaaaaaaagaggtcatattaatgggatgaaaacccaagtgagttattatatgaccgagaaagtctgcattaagataaagaccctgaaaacacatgttatgtatcagctgcctaaggaagcttcttgtaaggtccaaaaactaaaaagactgttaataaaagaaactttcagtcagaataagtctgtaagtttttttttttctttttaattgtaaatggttctttgtcagtttagtaaaccagtgaaatgttgaaatgttttgacatgtactggtcaaacttcagaccttaaaatattgctgtatagctatgctataggttttttcctttgttttggtatatgtaaccatacctatattattaaaatagatggatatagaagccagcataattgaaaacacatctgcagatctcttttgcaaactattaaatcaaaacattaactactttatgtgtaatgtgtaaatttttaccatattttttatattctgtaataatgtcaactatgatttagattgacttaaatttgggctctttttaatgatcactcacaaatgtatgtttcttttagctggccagtacttttgagtaaagcccctatagtttgacttgcactacaaatgcattttttttttaataacatttgccctacttgtgctttgtgtttctttcattattatgacataagctacctgggtccacttgtcttttcttttttttgtttcacagaaaagatgggttcgagttcagtggtcttcatcttccaagcatcattactaaccaagtcagacgttaacaaatttttatgttaggaaaaggaggaatgttatagatacatagaaaattgaagtaaaatgttttcattttagcaaggatttagggttctaactaaaactcagaatctttattgagttaagaaaagtttctctaccttggtttaatcaatatttttgtaaaatcctattgttattacaaagaggacacttcataggaaacatctttttctttagtcaggtttttaatattcagggggaaattgaaagatatatattttagtcgatttttcaaaaggggaaaaaagtccaggtcagcataagtcattttgtgtatttcactgaagttataaggtttttataaatgttctttgaaggggaaaaggcacaagccaatttttcctatgatcaaaaaattctttctttcctctgagtgagagttatctatatctgaggctaaagtttaccttgctttaataaataatttgccacatcattgcagaagaggtatcctcatgctggggttaatagaatatgtcagtttatcacttgtcgcttatttagctttaaaataaaaattaataggcaaagcaatggaatatttgcagtttcacctaaagagcagcataaggaggcgggaatccaaagtgaagttgtttgatatggtctacttcttttttggaatttcctgaccattaattaaagaattggatttgcaagtttgaaaactggaaaagcaagagatgggatgccataatagtaaacagcccttgtgttggatgtaacccaatcccagatttgagtgtgtgttgattatttttttgtcttccacttttctattatgtgtaaatcacttttatttctgcagacattttcctctcagataggatgacattttgttttgtattattttgtctttcctcatgaatgcactgataatattttaaatgctctattttaagatctcttgaatctgttttttttttttttaatttgggggttctgtaaggtctttatttcccataagtaaatattgccatgggaggggggtggaggtggcaaggaaggggtgaagtgctagtatgcaagtgggcagcaattatttttgtgttaatcagcagtacaatttgatcgttggcatggttaaaaaatggaatataagattagctgttttgtattttgatgaccaattacgctgtattttaacacgatgtatgtctgtttttgtggtgctctagtggtaaataaattatttcgatgatatgtggatgtctttttcctatcagtaccatcatcgagtctagaaaacacctgtgatgcaataagactatctcaagctggaaaagtcataccacctttccgattgccctctgtgctttctcccttaaggacagtcacttcagaagtcatgctttaaagcacaagagtcaggccatatccatcaaggatagaagaaatccctgtgccgtctttttattcccttatttattgctatttggtaattgtttgagatttagtttccatccagcttgactgccgaccagaaaaaatgcagagagatgtttgcaccatgctttggctttctggttctatgttctgccaacgccagggccaaaagaactggtctagacagtatcccctgtagccccataacttggatagttgctgagccagccagatataacaagagccacgtgctttctggggttggttgtttgggatcagctacttgcctgtcagtttcactggtaccactgcaccacaaacaaaaaaacccaccctatttcctccaatttttttggctgctacctacaagaccagactcctcaaacgagttgccaatctcttaataaataggattaataaaaaaagtaattgtgactcaa

SEQ ID NO: 266 - DNA, 1280 bp, Homo sapiens
ggggaggccgcctggttttcctccctccttctgcacgtctgctggggtctcttcctctccaggccttgccgtccccctggcctctcttcccagctcacacatgaagatgcacttgcaaagggctctggtggtcctggccctgctgaactttgccacggtcagcctctctctgtccacttgcaccaccttggacttcggccacatcaagaagaagagggtggaagccattaggggacagatcttgagcaagctcaggctcaccagcccccctgagccaacggtgatgacccacgtcccctatcaggtcctggccctttacaacagcacccgggagctgctggaggagatgcatggggagagggaggaaggctgcacccaggaaaacaccgagtcggaatactatgccaaagaaatccataaattcgacatgatccaggggctggcggagcacaacgaactggctgtctgccctaaaggaattacctccaaggttttccgcttcaatgtgtcctcagtggagaaaaatagaaccaacctattccgagcagaattccgggtcttgcgggtgcccaaccccagctctaagcggaatgagcagaggatcgagctcttccagatccttcggccagatgagcacattgccaaacagcgctatatcggtggcaagaatctgcccacacggggcactgccgagtggctgtcctttgatgtcactgacactgtgcgtgagtggctgttgagaagagagtccaacttaggtctagaaatcagcattcactgtccatgtcacacctttcagcccaatggagatatcctggaaaacattcacgaggtgatggaaatcaaattcaaaggcgtggacaatgaggatgaccatggccgtggagatctggggcgcctcaagaagcagaaggatcaccacaaccctcatctaatcctcatgatgattcccccacaccggctcgacaacccgggccaggggggtcagaggaagaagcgggctttggacaccaattactgcttccggtgagactgggcccacatgggaaccaacatctactgcctgcctactgcccaatggctaggtcaggccccagagccaagccacactcaacagagggtccctgatgctattcacaaacatctccaggaagaagactgaaaatctctcacagagattttctctgtgaaatctctttctgttttcctgggagtcccactgtttttccataggctaactctggaaggagctggctgaagtaaatgaggaaaactctgtg

SEQ ID NO: 267 - DNA, 2522 bp, Homo sapiens
tgcttgccctccacctggcctgctgggagtcagagcccagcaaaacctgtttagacacatggacaagaatcccagcgctacaaggcacacagtccgcttcttcgtcctcagggttgccagcgcttcctggaagtcctgaagctctcgcagtgcagtgagttcatgcaccttcttgccaagcctcagtctttgggatctggggaggccgcctggttttcctccctccttctgcacgtctgctggggtctcttcctctccaggccttgccgtccccctggcctctcttcccagctcacacatgaagatgcacttgcaaagggctctggtggtcctggccctgctgaactttgccacggtcagcctctctctgtccacttgcaccaccttggacttcggccacatcaagaagaagagggtggaagccattaggggacagatcttgagcaagctcaggctcaccagcccccctgagccaacggtgatgacccacgtcccctatcaggtcctggccctttacaacagcacccgggagctgctggaggagatgcatggggagagggaggaaggctgcacccaggaaaacaccgagtcggaatactatgccaaagaaatccataaattcgacatgatccaggggctggcggagcacaacgaactggctgtctgccctaaaggaattacctccaaggttttccgcttcaatgtgtcctcagtggagaaaaatagaaccaacctattccgagcagaattccgggtcttgcgggtgcccaaccccagctctaagcggaatgagcagaggatcgagctcttccagatccttcggccagatgagcacattgccaaacagcgctatatcggtggcaagaatctgcccacacggggcactgccgagtggctgtcctttgatgtcactgacactgtgcgtgagtggctgttgagaagagagtccaacttaggtctagaaatcagcattcactgtccatgtcacacctttcagcccaatggagatatcctggaaaacattcacgaggtgatggaaatcaaattcaaaggcgtggacaatgaggatgaccatggccgtggagatctggggcgcctcaagaagcagaaggatcaccacaaccctcatctaatcctcatgatgattcccccacaccggctcgacaacccgggccaggggggtcagaggaagaagcgggctttggacaccaattactgcttccgcaacttggaggagaactgctgtgtgcgccccctctacattgacttccgacaggatctgggctggaagtgggtccatgaacctaagggctactatgccaacttctgctcaggcccttgcccatacctccgcagtgcagacacaacccacagcacggtgctgggactgtacaacactctgaaccctgaagcatctgcctcgccttgctgcgtgccccaggacctggagcccctgaccatcctgtactatgttgggaggacccccaaagtggagcagctctccaacatggtggtgaagtcttgtaaatgtagctgagaccccacgtgcgacagagagaggggagagagaaccaccactgcctgactgcccgctcctcgggaaacacacaagcaacaaacctcactgagaggcctggagcccacaaccttcggctccgggcaaatggctgagatggaggtttccttttggaacatttctttcttgctggctctgagaatcacggtggtaaagaaagtgtgggtttggttagaggaaggctgaactcttcagaacacacagactttctgtgacgcagacagaggggatggggatagaggaaagggatggtaagttgagatgttgtgtggcaatgggatttgggctaccctaaagggagaaggaagggcagagaatggctgggtcagggccagactggaagacacttcagatctgaggttggatttgctcattgctgtaccacatctgctctagggaatctggattatgttatacaaggcaagcattttttttttttttttaaagacaggttacgaagacaaagtcccagaattgtatctcatactgtctgggattaagggcaaatctattacttttgcaaactgtcctctacatcaattaacatcgtgggtcactacagggagaaaatccaggtcatgcagttcctggcccatcaactgtattgggccttttggatatgctgaacgcagaagaaagggtggaaatcaaccctctcctgtctgccctctgggtccctcctctcacctctccctcgatcatatttccccttggacacttggttagacgccttccaggtcaggatgcacatttctggattgtggttccatgcagccttggggcattatgggttcttcccccacttcccctccaagaccctgtgttcatttggtgttcctggaagcaggtgctacaacatgtgaggcattcggggaagctgcacatgtgccacacagtgacttggccccagacgcatagactgaggtataaagacaagtatgaatat

SEQ ID NO: 268 - RNA, 1316 nt, Artificial Sequence
  Description of Artificial Sequence: Synthetic Transcript Sequence
gggaaauaagagagaaaagaagaguaagaagaaauauaagagccaccaugcccccaucgggauugagauuguugccccuucugcuuccgcugcuuugguugcucguccugaccccuggcaggcccgcagcgggguugucgacguguaagacgauugacauggagcucgugaaacgcaagagaauugaagcaaucaggggucaaauucugagcaaacucagacucgcauccccaccgucccagggugaggucccaccgggaccucugcccgaggcgguccuggccuuguacaacucgacacgcgaccgagucgcaggggagucagcggaacccgagcccgaacccgaggccgacuacuacgccaaagaggucacucgggucuugaugguggaaacucacaacgaaaucuacgacaaguuuaagcagucgacccauucgaucuacauguucuucaauaccagcgagcuuagagaagcgguccccgagccgguacuuuuguccagagcggagcugcgguugcucaggcucaagcugaaaguggaacagcacguagagcuuuaucagaaguacagcaacaauucauggcgguaucucucgaaccggcuguuggcgccgucggauucacccgaauggcucagcuuugaugucacggggguggugcgccagugguuguccaggggcggagagaucgaaggauuucggcucucagcccacuguucgugugauagcagggacaacacgcuccaaguagauaucaacggauucacuacuggucgcagaggggaucuugcgacaauccacgguaugaaucgcccuuuucuccugcugauggccacaccccuugaacgggcgcaacaucuucagucaucccgccauaggagagcacuggacacgaacuacuguuuuucgucgacagagaagaauugcugcgugcggcagcuuuacaucgacuuccgaaaagaucucggguggaaauggauucaugaaccgaagggguaucacgccaacuucugccuggguccguguccuuauaucuggucguuggauacacaguauucaaagguguuggcucuuuacaaucagcacaacccgggagccucggcugcgccuuguugcguaccccaggcauuggagccauugccgauuguguauuaugugggaagaaagccgaaaguggagcaguugucgaauaugaucguacggagcugcaaaugcuccugauaagcugccuucugcggggcuugccuucuggccaugcccuucuucucucccuugcaccuguaccucuuggucuuugaauaaagccugaguaggaag

SEQ ID NO: 269 - protein, 122 aa, Homo sapiens
MAGHLASDFAFSPPPGGGGDGPGGPEPGWVDPRTWLSFQGPPGGPGIGPGVGPGSEVWGIPPCPPPYEFCGGMAYCGPQVGVGLVPQGGLETSQPEGEAGGGEQLRWGLPGALHRHPWCREA

SEQ ID NO: 270 - protein, 360 aa, Homo sapiens
MAGHLASDFAFSPPPGGGGDGPGGPEPGWVDPRTWLSFQGPPGGPGIGPGVGPGSEVWGIPPCPPPYEFCGGMAYCGPQVGVGLVPQGGLETSQPEGEAGVGVESNSDGASPEPCTVTPGAVKLEKEKLEQNPEESQDIKALQKELEQFAKLLKQKRITLGYTQADVGLTLGVLFGKVFSQTTICRFEALQLSFKNMCKLRPLLQKWVEEADNNENLQEICKAETLVQARKRKRTSIENRVRGNLENLFLQCPKPTLQQISHIAQQLGLEKDVVRVWFCNRRQKGKRSSSDYAQREDFEAAGSPFSGGPVSFPLAPGPHFGTPGYGSPHFTALYSSVPFPEGEAFPPVSVTTLGSPMHSN

SEQ ID NO: 271 - protein, 185 aa, Homo sapiens
MAGHLASDFAFSPPPGGGGDGPGGPEPGWVDPRTWLSFQGPPGGPGIGPGVGPGSEVWGIPPCPPPYEFCGGMAYCGPQVGVGLVPQGGLETSQPEGEAGVGVESNSDGASPEPCTVTPGAVKLEKEKLEQNPEESQDIKALQKELEQFAKLLKQKRITLGYTQADVHPGGSIWEGIQPNDHLPL

SEQ ID NO: 272 - protein, 265 aa, Homo sapiens
MHFYRLFLGATRRFLNPEWKGEIDNWCVYVLTSLLPFKIQSQDIKALQKELEQFAKLLKQKRITLGYTQADVGLTLGVLFGKVFSQTTICRFEALQLSFKNMCKLRPLLQKWVEEADNNENLQEICKAETLVQARKRKRTSIENRVRGNLENLFLQCPKPTLQQISHIAQQLGLEKDVVRVWFCNRRQKGKRSSSDYAQREDFEAAGSPFSGGPVSFPLAPGPHFGTPGYGSPHFTALYSSVPFPEGEAFPPVSVTTLGSPMHSN

SEQ ID NO: 273 - protein, 360 aa, Homo sapiens; identical to SEQ ID NO: 270

SEQ ID NO: 274 - protein, 123 aa, Homo sapiens
MAGHLASDFAFSPPPGGGGDGPGGPEPGWVDPRTWLSFQGPPGGPGIGPGVGPGSEVWGIPPCPPPYEFCGGMAYCGPQVGVGLVPQGGLETSQPEGEAGVGVETPMGPPRSPAPHPFPFPLL

SEQ ID NO: 275 - protein, 265 aa, Homo sapiens; identical to SEQ ID NO: 272

SEQ ID NO: 276 - protein, 360 aa, Homo sapiens; identical to SEQ ID NO: 270

SEQ ID NO: 277 - protein, 185 aa, Homo sapiens; identical to SEQ ID NO: 271

SEQ ID NO: 278 - protein, 123 aa, Homo sapiens; identical to SEQ ID NO: 274

SEQ ID NO: 279 - protein, 185 aa, Homo sapiens; identical to SEQ ID NO: 271

SEQ ID NO: 280 - protein, 265 aa, Homo sapiens; identical to SEQ ID NO: 272

SEQ ID NO: 281 - protein, 123 aa, Homo sapiens; identical to SEQ ID NO: 274

SEQ ID NO: 282 - protein, 360 aa, Homo sapiens; identical to SEQ ID NO: 270

SEQ ID NO: 283 - protein, 265 aa, Homo sapiens; identical to SEQ ID NO: 272

SEQ ID NO: 284 - protein, 360 aa, Homo sapiens; identical to SEQ ID NO: 270

SEQ ID NO: 285 - protein, 185 aa, Homo sapiens; identical to SEQ ID NO: 271

SEQ ID NO: 286 - protein, 123 aa, Homo sapiens; identical to SEQ ID NO: 274

SEQ ID NO: 287 - protein, 185 aa, Homo sapiens; identical to SEQ ID NO: 271

SEQ ID NO: 288 - protein, 123 aa, Homo sapiens; identical to SEQ ID NO: 274

SEQ ID NO: 289 - protein, 360 aa, Homo sapiens; identical to SEQ ID NO: 270

SEQ ID NO: 290 - protein, 265 aa, Homo sapiens; identical to SEQ ID NO: 272

SEQ ID NO: 291 - protein, 185 aa, Homo sapiens; identical to SEQ ID NO: 271

SEQ ID NO: 292 - protein, 265 aa, Homo sapiens; identical to SEQ ID NO: 272

SEQ ID NO: 293 - protein, 360 aa, Homo sapiens; identical to SEQ ID NO: 270

SEQ ID NO: 294 - protein, 123 aa, Homo sapiens; identical to SEQ ID NO: 274

SEQ ID NO: 295 - protein, 391 aa, Homo sapiens
MYSMMMETDLHSPGGAQAPTNLSGPAGAGGGGGGGGGGGGGGGAKANQDRVKRPMNAFMVWSRGQRRKMAQENPKMHNSEISKRLGAEWKVMSEAEKRPFIDEAKRLRALHMKEHPDYKYRPRRKTKTLLKKDKYSLAGGLLAAGAGGGGAAVAMGVGVGVGAAAVGQRLESPGGAAGGGYAHVNGWANGAYPGSVAAAAAAAAMMQEAQLAYGQHPGAGGAHPHAHPAHPHPHHPHAHPHNPQPMHRYDMGALQYSPISNSQGYMSASPSGYGGLPYGAAAAAAAAAGGAHQNSAVAAAAAAAAASSGALGALGSLVKSEPSGSPPAPAHSRAPCPGDLREMISMYLPAGEGGDPAAAAAAAAQSRLHSLPQHYQGAGAGVNGTVPLTHI

SEQ ID NO: 296 - protein, 317 aa, Homo sapiens
MYNMMETELKPPGPQQTSGGGGGNSTAAAAGGNQKNSPDRVKRPMNAFMVWSRGQRRKMAQENPKMHNSEISKRLGAEWKLLSETEKRPFIDEAKRLRALHMKEHPDYKYRPRRKTKTLMKKDKYTLPGGLLAPGGNSMASGVGVGAGLGAGVNQRMDSYAHMNGWSNGSYSMMQDQLGYPQHPGLNAHGAAQMQPMHRYDVSALQYNSMTSSQTYMNGSPTYSMSYSQQGTPGMALGSMGSVVKSEASSSPPVVTSSSHSRAPCQAGDLRDMISMYLPGAEVPEPAAPSRLHMSQHYQSGPVPGTAINGTLPLSHM

SEQ ID NO: 297 - protein, 317 aa, Homo sapiens; identical to SEQ ID NO: 296

SEQ ID NO: 298 - protein, 446 aa, Homo sapiens
MRPVRENSSGARSPRVPADLARSILISLPFPPDSLAHRPPSSAPTESQGLFTVAAPAPGAPSPPATLAHLLPAPAMYSLLETELKNPVGTPTQAAGTGGPAAPGGAGKSSANAAGGANSGGGSSGGASGGGGGTDQDRVKRPMNAFMVWSRGQRRKMALENPKMHNSEISKRLGADWKLLTDAEKRPFIDEAKRLRAVHMKEYPDYKYRPRRKTKTLLKKDKYSLPSGLLPPGAAAAAAAAAAAAAAASSPVGVGQRLDTYTHVNGWANGAYSLVQEQLGYAQPPSMSSPPPPPALPPMHRYDMAGLQYSPMMPPGAQSYMNVAAAAAAASGYGGMAPSATAAAAAAYGQQPATAAAAAAAAAAMSLGPMGSVVKSEPSSPPPAIASHSQRACLGDLRDMISMYLPPGGDAADAASPLPGGRLHGVHQHYQGAGTAVNGTVPLTHI

SEQ ID NO: 299 - protein, 233 aa, Homo sapiens [sequence omitted]

SEQ ID NO: 300 - protein, 384 aa, Homo sapiens [sequence omitted]

SEQ ID NO: 301 - protein, 305 aa, Homo sapiens
MSVDPACPQSLPCFEASDCKESSPMPVICGPEENYPSLQMSSAEMPHTETVSPLPSSMDLLIQDSPDSSTSPKGKQPTSAEKSVAKKEDKVPVKKQKTRTVFSSTQLCVLNDRFQRQKYLSLQQMQELSNILNLSYKQVKTWFQNQRMKSKRWQKNNWPKNSNGVTQKASAPTYPSLYSSYHQGCLVNPTGNLPMWSNQTWNNSTWSNQTQNIQSWSNHSWNTQTWCTQSWNNQAWNSPFYNCGEESLQSCMQFQPNSPASDLEAALEAAGEGLNVIQQTTRYFSTPQTMDLFLNYSMNMQPEDV

SEQ ID NO: 302 - protein, 289 aa, Homo sapiens
MSVDPACPQSLPCFEASDCKESSPMPVICGPEENYPSLQMSSAEMPHTETVSPLPSSMDLLIQDSPDSSTSPKGKQPTSAEKSVAKKEDKVPVKKQKTRTVFSSTQLCVLNDRFQRQKYLSLQQMQELSNILNLSYKQVKTWFQNQRMKSKRWQKNNWPKNSNGVTQGCLVNPTGNLPMWSNQTWNNSTWSNQTQNIQSWSNHSWNTQTWCTQSWNNQAWNSPFYNCGEESLQSCMQFQPNSPASDLEAALEAAGEGLNVIQQTTRYFSTPQTMDLFLNYSMNMQPEDV

SEQ ID NO: 303 - protein, 362 aa, Homo sapiens
MATAETALPSISTLTALGPFPDTQDDFLKWWRSEEAQDMGPGPPDPTEPPLHVKSEDQPGEEEDDERGADATWDLDLLLTNFSGPEPGGAPQTCALAPSEASGAQYPPPPETLGAYAGGPGLVAGLLGSEDHSGWVRPALRARAPDAFVGPALAPAPAPEPKALALQPVYPGPGAGSSGGYFPRTGLSVPAASGAPYGLLSGYPAMYPAPQYQGHFQLFRGLQGPAPGPATSPSFLSCLGPGTVGTGLGGTAEDPGVIAETAPSKRGRRSWARKRQAAHTCAHPGCGKSYTKSSHLKAHLRTHTGEKPYACTWEGCGWRFARSDELTRHYRKHTGQRPFRCQLCPRAFSRSDHLALHMKRHL

SEQ ID NO: 304 - protein, 355 aa, Homo sapiens
MALSEPILPSFSTFASPCRERGLQERWPRAEPESGGTDDDLNSVLDFILSMGLDGLGAEAAPEPPPPPPPPAFYYPEPGAPPPYSAPAGGLVSELLRPELDAPLGPALHGRFLLAPPGRLVKAEPPEADGGGGYGCAPGLTRGPRGLKREGAPGPAASCMRGPGGRPPPPPDTPPLSPDGPARLPAPGPRASFPPPFGGPGFGAPGPGLHYAPPAPPAFGLFDDAAAAAAALGLAPPAARGLLTPPASPLELLEAKPKRGRRSWPRKRTATHTCSYAGCGKTYTKSSHLKAHLRTHTGEKPYHCNWDGCGWKFARSDELTRHYRKHTGHRPFQCHLCDRAFSRSDHLALHMKRHM

SEQ ID NO: 305 - protein, 232 aa, Homo sapiens
MAVSDALLPSFSTFASGPAGREKTLRQAGAPNNRWREELSHMKRLPPVLPGRPYDLAAATVATDLESGGAGAACGGSNLAPLPRRETEEFNDLLDLDFILSNSLTHPPESVAATVSSSASASSSSSPSSSGPASAPSTCSFTYPIRAGNDPGVAPGGTGGGLLYGRESAPPPTAPFNLADINDVSPSGGFVAELLRPELDPVYIPPQQPQPPGGGLMGKFVLKASLSAPGSE

SEQ ID NO: 306 - protein, 38 aa, Homo sapiens
MRQPPGESDMAVSDALLPSFSTFASGPAGREKTLRQAG

SEQ ID NO: 307 - protein, 22 aa, Homo sapiens
MRQPPGESDMAVSDALLPSFST

SEQ ID NO: 308 - protein, 479 aa, Homo sapiens
MRQPPGESDMAVSDALLPSFSTFASGPAGREKTLRQAGAPNNRWREELSHMKRLPPVLPGRPYDLAAATVATDLESGGAGAACGGSNLAPLPRRETEEFNDLLDLDFILSNSLTHPPESVAATVSSSASASSSSSPSSSGPASAPSTCSFTYPIRAGNDPGVAPGGTGGGLLYGRESAPPPTAPFNLADINDVSPSGGFVAELLRPELDPVYIPPQQPQPPGGGLMGKFVLKASLSAPGSEYGSPSVISVSKGSPDGSHPVVVAPYNGGPPRTCPKIKQEAVSSCTHLGAGPPLSNGHRPAAHDFPLGRQLPSRTTPTLGLEEVLSSRDCHPALPLPPGFHPHPGPNYPSFLPDQMQPQVPPLHYQELMPPGSCMPEEPKPKRGRRSWPRKRTATHTCDYAGCGKTYTKSSHLKAHLRTHTGEKPYHCDWDGCGWKFARSDELTRHYRKHTGHRPFQCQKCDRAFSRSDHLALHMKRHF

SEQ ID NO: 309 - protein, 457 aa, Homo sapiens
MATRVLSMSARLGPVPQPPAPQDEPVFAQLKPVLGAANPARDAALFPGEELKHAHHRPQAQPAPAQAPQPAQPPATGPRLPPEDLVQTRCEMEKYLTPQLPPVPIIPEHKKYRRDSASVVDQFFTDTEGLPYSINMNVFLPDITHLRTGLYKSQRPCVTHIKTEPVAIFSHQSETTAPPPAPTQALPEFTSIFSSHQTAAPEVNNIFIKQELPTPDLHLSVPTQQGHLYQLLNTPDLDMPSSTNQTAAMDTLNVSMSAAMAGLNTHTSAVPQTAVKQFQGMPPCTYTMPSQFLPQQATYFPPSPPSSEPGSPDRQAEMLQNLTPPPSYAATIASKLAIHNPNLPTTLPVNSQNIQPVRYNRRSNPDLEKRRIHYCDYPGCTKVYTKSSHLKAHLRTHTGEKPYKCTWEGCDWRFARSDELTRHYRKHTGAKPFQCGVCNRSFSRSDHLALHMKRHQN

SEQ ID NO: 310 - protein, 366 aa, Homo sapiens
MEKYLTPQLPPVPIIPEHKKYRRDSASVVDQFFTDTEGLPYSINMNVFLPDITHLRTGLYKSQRPCVTHIKTEPVAIFSHQSETTAPPPAPTQALPEFTSIFSSHQTAAPEVNNIFIKQELPTPDLHLSVPTQQGHLYQLLNTPDLDMPSSTNQTAAMDTLNVSMSAAMAGLNTHTSAVPQTAVKQFQGMPPCTYTMPSQFLPQQATYFPPSPPSSEPGSPDRQAEMLQNLTPPPSYAATIASKLAIHNPNLPTTLPVNSQNIQPVRYNRRSNPDLEKRRIHYCDYPGCTKVYTKSSHLKAHLRTHTGEKPYKCTWEGCDWRFARSDELTRHYRKHTGAKPFQCGVCNRSFSRSDHLALHMKRHQN

SEQ ID NO: 311 - protein, 437 aa, Homo sapiens
MATRVLSMSARLGPVPQPPAPQDEPVFAQLKPVLGAANPARDAALFPGEELKHAHHRPRLPPEDLVQTRCEMEKYLTPQLPPVPIIPEHKKYRRDSASVVDQFFTDTEGLPYSINMNVFLPDITHLRTGLYKSQRPCVTHIKTEPVAIFSHQSETTAPPPAPTQALPEFTSIFSSHQTAAPEVNNIFIKQELPTPDLHLSVPTQQGHLYQLLNTPDLDMPSSTNQTAAMDTLNVSMSAAMAGLNTHTSAVPQTAVKQFQGMPPCTYTMPSQFLPQQATYFPPSPPSSEPGSPDRQAEMLQNLTPPPSYAATIASKLAIHNPNLPTTLPVNSQNIQPVRYNRRSNPDLEKRRIHYCDYPGCTKVYTKSSHLKAHLRTHTGEKPYKCTWEGCDWRFARSDELTRHYRKHTGAKPFQCGVCNRSFSRSDHLALHMKRHQN

SEQ ID NO: 312 - protein, 21 aa, Homo sapiens
MSSNSDTGDLQESLKHGLTPI

SEQ ID NO: 313 - protein, 377 aa, Homo sapiens
  MOD_RES (1)..(1): Xaa = Any amino acid
XDLEELCPVCGDKVSGYHYGLLTCESCKGFFKRTVQNNKRYTCIENQNCQIDKTQRKRCPYCRFQKCLSVGMKLEAVRADRMRGGRNKFGPMYKRDRALKQQKKALIRANGLKLEAMSQVIQAMPSDLTISSAIQNIHSASKGLPLNHAALPPTDYDRSPFVTSPISMTMPPHGSLQGYQTYGHFPSRAIKSEYPDPYTSSPESIMGYSYMDSYQTSSPASIPHLILELLKCEPDEPQVQAKIMAYLQQEQANRSKHEKLSTFGLMCKMADQTLFSIVEWARSSIFFRELKGLTLSPSLECSGTILAHGNLHLLHSSDSPASASRVAGITGVHHNTHLIFVFLVEMGFCHVGQAGLKTPDLRVICLPRPPKVLGLWA

SEQ ID NO: 314 - protein, 541 aa, Homo sapiens
MSSNSDTGDLQESLKHGLTPIGAGLPDRHGSPIPARGRLVMLPKVETEALGLARSHGEQGQMPENMQVSQFKMVNYSYDEDLEELCPVCGDKVSGYHYGLLTCESCKGFFKRTVQNNKRYTCIENQNCQIDKTQRKRCPYCRFQKCLSVGMKLEAVRADRMRGGRNKFGPMYKRDRALKQQKKALIRANGLKLEAMSQVIQAMPSDLTISSAIQNIHSASKGLPLNHAALPPTDYDRSPFVTSPISMTMPPHGSLQGYQTYGHFPSRAIKSEYPDPYTSSPESIMGYSYMDSYQTSSPASIPHLILELLKCEPDEPQVQAKIMAYLQQEQANRSKHEKLSTFGLMCKMADQTLFSIVEWARSSIFFRELKVDDQMKLLQNCWSELLILDHIYRQVVHGKEGSIFLVTGQQVDYSIIASQAGATLNNLMSHAQELVAKLRSLQFDQREFVCLKFLVLFSLDVKNLENFQLVEGVQEQVNAALLDYTMCNYPQQTEKFGQLLLRLPEIRAISMQAEEYLYYKHLNGDVPYNNLLIEMLHAKRA

SEQ ID NO: 315 - protein, 71 aa, Homo sapiens
  MOD_RES (1)..(1): Xaa = Any amino acid
XSLKHGLTPIDRGNCRSGCFSFAATLRQRSLLTSCAGLPDRHGSPIPARGRLVMLPKVETEALGLARSHGE

SEQ ID NO: 316 - protein, 469 aa, Homo sapiens
MVNYSYDEDLEELCPVCGDKVSGYHYGLLTCESCKGFFKRTVQNNKRYTCIENQNCQIDKTQRKRCPYCRFQKCLSVGMKLEAVRADRMRGGRNKFGPMYKRDRALKQQKKALIRANGLKLEAMSQVIQAMPSDLTISSAIQNIHSASKGLPLNHAALPPTDYDRSPFVTSPISMTMPPHGSLQGYQTYGHFPSRAIKSEYPDPYTSSPESIMGYSYMDSYQTSSPASIPHLILELLKCEPDEPQVQAKIMAYLQQEQANRSKHEKLSTFGLMCKMADQTLFSIVEWARSSIFFRELKVDDQMKLLQNCWSELLILDHIYRQVVHGKEGSIFLVTGQQVDYSIIASQAGATLNNLMSHAQELVAKLRSLQFDQREFVCLKFLVLFSLDVKNLENFQLVEGVQEQVNAALLDYTMCNYPQQTEKFGQLLLRLPEIRAISMQAEEYLYYKHLNGDVPYNNLLIEMLHAKRA

SEQ ID NO: 317 - protein, 323 aa, Homo sapiens
DLEELCPVCGDKVSGYHYGLLTCESCKGFFKRTVQNNKRYTCIENQNCQIDKTQRKRCPYCRFQKCLSVGMKLEAVRADRMRGGRNKFGPMYKRDRALKQQKKALIRANGLKLEAMSQVIQAMPSDLTISSAIQNIHSASKGLPLNHAALPPTDYDRSPFVTSPISMTMPPHGSLQGYQTYGHFPSRAIKSEYPDPYTSSPESIMGYSYMDSYQTSSPASIPHLILELLKCEPDEPQVQAKIMAYLQQEQANRSKHEKLSTFGLMCKMADQTLFSIVEWARSSIFFRELKGLTLSPSLECSGSWLMATSTSCIQVIRLPQPPE

SEQ ID NO: 318 - protein, 495 aa, Homo sapiens
MSSNSDTGDLQESLKHGLTPIVSQFKMVNYSYDEDLEELCPVCGDKVSGYHYGLLTCESCKGFFKRTVQNNKRYTCIENQNCQIDKTQRKRCPYCRFQKCLSVGMKLEAVRADRMRGGRNKFGPMYKRDRALKQQKKALIRANGLKLEAMSQVIQAMPSDLTISSAIQNIHSASKGLPLNHAALPPTDYDRSPFVTSPISMTMPPHGSLQGYQTYGHFPSRAIKSEYPDPYTSSPESIMGYSYMDSYQTSSPASIPHLILELLKCEPDEPQVQAKIMAYLQQEQANRSKHEKLSTFGLMCKMADQTLFSIVEWARSSIFFRELKVDDQMKLLQNCWSELLILDHIYRQVVHGKEGSIFLVTGQQVDYSIIASQAGATLNNLMSHAQELVAKLRSLQFDQREFVCLKFLVLFSLDVKNLENFQLVEGVQEQVNAALLDYTMCNYPQQTEKFGQLLLRLPEIRAISMQAEEYLYYKHLNGDVPYNNLLIEMLHAKRA

SEQ ID NO: 319 - protein, 82 aa, Homo sapiens
MSSNSDTGDLQESLKHGLTPIDRGNCRSGCFSFAATLRQRSLLTSCAGLPDRHGSPIPARGRLVMLPKVETEALGLARSHGE

SEQ ID NO: 320 - protein, 453 aa, Homo sapiens
LDFFRVVENQPPATMPLNVSFTNRNYDLDYDSVQPYFYCDEEENFYQQQQQSELQPPAPSEDIWKKFELLPTPPLSPSRRSGLCSPSYVAVTPFSLRGDNDGGGGSFSTADQLEMVTELLGGDMVNQSFICDPDDETFIKNIIIQDCMWSGFSAAAKLVSEKLASYQAARKDSGSPNPARGHSVCSTSSLYLQDLSAAASECIDPSVVFPYPLNDSSSPKSCASQDSSAFSPSSDSLLSSTESSPQGSPEPLVLHEETPPTTSSDSEEEQEDEEEIDVVSVEKRQAPGKRSESGSPSAGGHSKPPHSPLVLKRCHVSTHQHNYAAPPSTRKDYPAAKRVKLDSVRVLRQISNNRKCTSPRSSDTEENVKRRTHNVLERQRRNELKRSFFALRDQIPELENNEKAPKVVILKKATAYILSVQAEEQKLISEEDLLRKRREQLKHKLEQLRNSCA

SEQ ID NO: 321 - protein, 257 aa, Homo sapiens
MPLNVSFTNRNYDLDYDSVQPYFYCDEEENFYQQQQQSELQPPAPSEDIWKKFELLPTPPLSPSRRSGLCSPSYVAVTPFSLRGDNDGGGGSFSTADQLEMVTELLGGDMVNQSFICDPDDETFIKNIIIQDCMWSGFSAAAKLVSEKLASYQAARKDSGSPNPARGHSVCSTSSLYLQDLSAAASECIDPSVVFPYPLNDSSSPKSCASQDSSAFSPSSDSLLSSTESSPQGSPEPLVLHEETPPTTSSDSGGTRR

SEQ ID NO: 322 - protein, 454 aa, Homo sapiens
LDFFRVVENQQPPATMPLNVSFTNRNYDLDYDSVQPYFYCDEEENFYQQQQQSELQPPAPSEDIWKKFELLPTPPLSPSRRSGLCSPSYVAVTPFSLRGDNDGGGGSFSTADQLEMVTELLGGDMVNQSFICDPDDETFIKNIIIQDCMWSGFSAAAKLVSEKLASYQAARKDSGSPNPARGHSVCSTSSLYLQDLSAAASECIDPSVVFPYPLNDSSSPKSCASQDSSAFSPSSDSLLSSTESSPQGSPEPLVLHEETPPTTSSDSEEEQEDEEEIDVVSVEKRQAPGKRSESGSPSAGGHSKPPHSPLVLKRCHVSTHQHNYAAPPSTRKDYPAAKRVKLDSVRVLRQISNNRKCTSPRSSDTEENVKRRTHNVLERQRRNELKRSFFALRDQIPELENNEKAPKVVILKKATAYILSVQAEEQKLISEEDLLRKRREQLKHKLEQLRNSCA

SEQ ID NO: 323 - protein, 420 aa, Homo sapiens
MPLNVSFTNRNYDLDYDSVQPYFYCDEEDIWKKFELLPTPPLSPSRRSGLCSPSYVAVTPFSLRGDNDGGGGSFSTADQLEMVTELLGGDMVNQSFICDPDDETFIKNIIIQDCMWSGFSAAAKLVSEKLASYQAARKDSGSPNPARGHSVCSTSSLYLQDLSAAASECIDPSVVFPYPLNDSSSPKSCASQDSSAFSPSSDSLLSSTESSPQGSPEPLVLHEETPPTTSSDSEEEQEDEEEIDVVSVEKRQAPGKRSESGSPSAGGHSKPPHSPLVLKRCHVSTHQHNYAAPPSTRKDYPAAKRVKLDSVRVLRQISNNRKCTSPRSSDTEENVKRRTHNVLERQRRNELKRSFFALRDQIPELENNEKAPKVVILKKATAYILSVQAEEQKLISEEDLLRKRREQLKHKLEQLRNSCA

SEQ ID NO: 324 - protein, 382 aa, Homo sapiens
MPSCSTSTMPGMICKNPDLEFDSLQPCFYPDEDDFYFGGPDSTPPGEDIWKKFELLPTPPLSPSRGFAEHSSEPPSWVTEMLLENELWGSPAEEDAFGLGGLGGLTPNPVILQDCMWSGFSAREKLERAVSEKLQHGRGPPTAGSTAQSPGVAPPRPGGRQTSGGDHKALSTSGEDTLSDSDDEDDEEEDEEEEIDVVTVEKRRSSSNTKAVTTFTITVRPKNAALGPGRAQSSELILKRCLPIHQQHNYAAPSPYVESEDAPPQKKIKSEASPRPLKSVIPPKAKSLSPRNSDSEDSERRRNHNILERQRRNDLRSSFLTLRDHVPELVKNEKAAKVVILKKATEYVHSLQAEEHQLLLEKEKLQARQQQLLKKIEHARTC

SEQ ID NO: 325 - protein, 464 aa, Homo sapiens
MPSCSTSTMPGMICKNPDLEFDSLQPCFYPDEDDFYFGGPDSTPPGEDIWKKFELLPTPPLSPSRGFAEHSSEPPSWVTEMLLENELWGSPAEEDAFGLGGLGGLTPNPVILQDCMWSGFSAREKLERAVSEKLQHGRGPPTAGSTAQSPGAGAASPAGRGHGGAAGAGRAGAALPAELAHPAAECVDPAVVFPFPVNKREPAPVPAAPASAPAAGPAVASGAGIAAPAGAPGVAPPRPGGRQTSGGDHKALSTSGEDTLSDSDDEDDEEEDEEEEIDVVTVEKRRSSSNTKAVTTFTITVRPKNAALGPGRAQSSELILKRCLPIHQQHNYAAPSPYVESEDAPPQKKIKSEASPRPLKSVIPPKAKSLSPRNSDSEDSERRRNHNILERQRRNDLRSSFLTLRDHVPELVKNEKAAKVVILKKATEYVHSLQAEEHQLLLEKEKLQARQQQLLKKIEHARTC

SEQ ID NO: 326 - protein, 340 aa, Homo sapiens
MHTDLDTDMDMDTETTALCPSGSRRASPPGTPTPEADATLLKKSEKLLAELDRSGLPSAPGAPRRRGSMPVPYKHQLRRAQAVDELDWPPQASSSGSSDSLGSGEAAPAQKDGIFKVMLVGESGVGKSTLAGTFGGLQGDSAHEPENPEDTYERRIMVDKEEVTLVVYDIWEQGDAGGWLRDHCLQTGDAFLIVFSVTDRRSFSKVPETLLRLRAGRPHHDLPVILVGNKSDLARSREVSLEEGRHLAGTLSCKHIETSAALHHNTRELFEGAVRQIRLRRGRNHAGGQRPDPGSPEGPAPPARRESLTKKAKRFLANLVPRNAKFFKQRSRSCHDLSVL

SEQ ID NO: 327 - protein, 221 aa, Homo sapiens
MHTDLDTDMDMDTETTALCPSGSRRASPPGTPTPEADATLLKKSEKLLAELDRSGLPSAPGAPRRRGSMPVPYKHQLRRAQAVDELDWPPQASSSGSSDSLGSGEAAPAQKDGIFKVMLVGESGVGKSTLAGTFGGLQGDSAHEPENPGGCRRVAAGPLPSDRGRLSHRLLSHRPTEFLQSSRDPTSAPGWEAAPRPTRYPRWKQERLGPLPGGITGGCVS

SEQ ID NO: 328 - protein, 807 aa, Homo sapiens
MPRAPRCRAVRSLLRSHYREVLPLATFVRRLGPQGWRLVQRGDPAAFRALVAQCLVCVPWDARPPPAAPSFRQVSCLKELVARVLQRLCERGAKNVLAFGFALLDGARGGPPEAFTTSVRSYLPNTVTDALRGSGAWGLLLRRVGDDVLVHLLARCALFVLVAPSCAYQVCGPPLYQLGAATQARPPPHASGPRRRLGCERAWNHSVREAGVPLGLPAPGARRRGGSASRSLPLPKRPRRGAAPEPERTPVGQGSWAHPGRTRGPSDRGFCVVSPARPAEEATSLEGALSGTRHSHPSVGRQHHAGPPSTSRPPRPWDTPCPPVYAETKHFLYSSGDKEQLRPSFLLSSLRPSLTGARRLVETIFLGSRPWMPGTPRRLPRLPQRYWQMRPLFLELLGNHAQCPYGVLLKTHCPLRAAVTPAAGVCAREKPQGSVAAPEEEDTDPRRLVQLLRQHSSPWQVYGFVRACLRRLVPPGLWGSRHNERRFLRNTKKFISLGKHAKLSLQELTWKMSVRDCAWLRRSPGVGCVPAAEHRLREEILAKFLHWLMSVYVVELLRSFFYVTETTFQKNRLFFYRKSVWSKLQSIGIRQHLKRVQLRELSEAEVRQHREARPALLTSRLRFIPKPDGLRPIVNMDYVVGARTFRREKRAERLTSRVKALFSVLNYERARRPGLLGASVLGLDDIHRAWRTFVLRVRAQDPPPELYFVKVDVTGAYDTIPQDRLTEVIASIIKPQNTYCVRRYAVVQKAAHGHVRKAFKSHVLRPVPGDPAGLHPLHAALQPVLRRHGEQAVCGDSAGRAAPAFGG

SEQ ID NO: 329 - protein, 1069 aa, Homo sapiens
MPRAPRCRAVRSLLRSHYREVLPLATFVRRLGPQGWRLVQRGDPAAFRALVAQCLVCVPWDARPPPAAPSFRQVSCLKELVARVLQRLCERGAKNVLAFGFALLDGARGGPPEAFTTSVRSYLPNTVTDALRGSGAWGLLLRRVGDDVLVHLLARCALFVLVAPSCAYQVCGPPLYQLGAATQARPPPHASGPRRRLGCERAWNHSVREAGVPLGLPAPGARRRGGSASRSLPLPKRPRRGAAPEPERTPVGQGSWAHPGRTRGPSDRGFCVVSPARPAEEATSLEGALSGTRHSHPSVGRQHHAGPPSTSRPPRPWDTPCPPVYAETKHFLYSSGDKEQLRPSFLLSSLRPSLTGARRLVETIFLGSRPWMPGTPRRLPRLPQRYWQMRPLFLELLGNHAQCPYGVLLKTHCPLRAAVTPAAGVCAREKPQGSVAAPEEEDTDPRRLVQLLRQHSSPWQVYGFVRACLRRLVPPGLWGSRHNERRFLRNTKKFISLGKHAKLSLQELTWKMSVRDCAWLRRSPGVGCVPAAEHRLREEILAKFLHWLMSVYVVELLRSFFYVTETTFQKNRLFFYRKSVWSKLQSIGIRQHLKRVQLRELSEAEVRQHREARPALLTSRLRFIPKPDGLRPIVNMDYVVGARTFRREKRAERLTSRVKALFSVLNYERARRPGLLGASVLGLDDIHRAWRTFVLRVRAQDPPPELYFVKVDVTGAYDTIPQDRLTEVIASIIKPQNTYCVRRYAVVQKAAHGHVRKAFKSHVSTLTDLQPYMRQFVAHLQETSPLRDAVVIEQSSSLNEASSGLFDVFLRFMCHHAVRIRGKSYVQCQGIPQGSILSTLLCSLCYGDMENKLFAGIRRDGLLLRLVDDFLLVTPHLTHAKTFLSYARTSIRASLTFNRGFKAGRNMRRKLFGVLRLKCHSLFLDLQVNSLQTVCTNIYKILLLQAYRFHACVLQLPFHQQVWKNPTFFLRVISDTASLCYSILKAKNAGMSLGAKGAAGPLPSEAVQWLCHQAFLLKLTRHRVTYVPLLGSLRTAQTQLSRKLPGTTLTALEAAANPALPSDFKTILD

SEQ ID NO: 330 - protein, 1132 aa, Homo sapiens
MPRAPRCRAVRSLLRSHYREVLPLATFVRRLGPQGWRLVQRGDPAAFRALVAQCLVCVPWDARPPPAAPSFRQVSCLKELVARVLQRLCERGAKNVLAFGFALLDGARGGPPEAFTTSVRSYLPNTVTDALRGSGAWGLLLRRVGDDVLVHLLARCALFVLVAPSCAYQVCGPPLYQLGAATQARPPPHASGPRRRLGCERAWNHSVREAGVPLGLPAPGARRRGGSASRSLPLPKRPRRGAAPEPERTPVGQGSWAHPGRTRGPSDRGFCVVSPARPAEEATSLEGALSGTRHSHPSVGRQHHAGPPSTSRPPRPWDTPCPPVYAETKHFLYSSGDKEQLRPSFLLSSLRPSLTGARRLVETIFLGSRPWMPGTPRRLPRLPQRYWQMRPLFLELLGNHAQCPYGVLLKTHCPLRAAVTPAAGVCAREKPQGSVAAPEEEDTDPRRLVQLLRQHSSPWQVYGFVRACLRRLVPPGLWGSRHNERRFLRNTKKFISLGKHAKLSLQELTWKMSVRDCAWLRRSPGVGCVPAAEHRLREEILAKFLHWLMSVYVVELLRSFFYVTETTFQKNRLFFYRKSVWSKLQSIGIRQHLKRVQLRELSEAEVRQHREARPALLTSRLRFIPKPDGLRPIVNMDYVVGARTFRREKRAERLTSRVKALFSVLNYERARRPGLLGASVLGLDDIHRAWRTFVLRVRAQDPPPELYFVKVDVTGAYDTIPQDRLTEVIASIIKPQNTYCVRRYAVVQKAAHGHVRKAFKSHVSTLTDLQPYMRQFVAHLQETSPLRDAVVIEQSSSLNEASSGLFDVFLRFMCHHAVRIRGKSYVQCQGIPQGSILSTLLCSLCYGDMENKLFAGIRRDGLLLRLVDDFLLVTPHLTHAKTFLRTLVRGVPEYGCVVNLRKTVVNFPVEDEALGGTAFVQMPAHGLFPWCGLLLDTRTLEVQSDYSSYARTSIRASLTFNRGFKAGRNMRRKLFGVLRLKCHSLFLDLQVNSLQTVCTNIYKILLLQAYRFHACVLQLPFHQQVWKNPTFFLRVISDTASLCYSILKAKNAGMSLGAKGAAGPLPSEAVQWLCHQAFLLKLTRHRVTYVPLLGSLRTAQTQLSRKLPGTTLTALEAAANPALPSDFKTILD

SEQ ID NO: 331 - protein, 807 aa, Homo sapiens; identical to SEQ ID NO: 328

SEQ ID NO: 332 - protein, 209 aa, Homo sapiens
MGSVSNQQFAGGCAKAAEEAPEEAPEDAARAADEPQLLHGAGICKWFNVRMGFGFLSMTARAGVALDPPVDVFVHQSKLHMEGFRSLKEGEAVEFTFKKSAKGLESIRVTGPGGVFCIGSERRPKGKSMQKRRSKGDRCYNCGGLDHHAKECKLPPQPKKCHFCQSISHMVASCPLKAQQGPSAQGKPTYFREEEEEIHSPTLLPEAQN

SEQ ID NO: 333 - protein, 209 aa, Homo sapiens; identical to SEQ ID NO: 332

SEQ ID NO: 334 - protein, 250 aa, Homo sapiens
MAEGGASKGGGEEPGKLPEPAEEESQVLRGTGHCKWFNVRMGFGFISMINREGSPLDIPVDVFVHQSKLFMEGFRSLKEGEPVEFTFKKSSKGLESIRVTGPGGSPCLGSERRPKGKTLQKRKPKGDRCYNCGGLDHHAKECSLPPQPKKCHYCQSIMHMVANCPHKNVAQPPASSQGRQEAESQPCTSTLPREVGGGHGCTSPPFPQEARAEISERSGRSPQEASSTKSSIAPEEQSKKGPSVQKRKKT

SEQ ID NO: 335 - protein, 236 aa, Homo sapiens
MESSAKMESGGAGQQPQPQPQQPFLPPAACFFATAAAAAAAAAAAAAQSAQQQQQQQQQQQQAPQLRPAADGQPSGGGHKSAPKQVKRQRSSSPELMRCKRRLNFSGFGYSLPQQQPAAVARRNERERNRVKLVNLGFATLREHVPNGAANKKMSKVETLRSAVEYIRALQQLLDEHDAVSAAFQAGVLSPTISPNYSNDLNSMAGSPVSSYSSDEGSYDPLSPEEQELLDFTNWF

SEQ ID NO: 336 - protein, 443 aa, Homo sapiens
MATAASNHYSLLTSSASIVHAEPPGGMQQGAGGYREAQSLVQGDYGALQSNGHPLSHAHQWITALSHGGGGGGGGGGGGGGGGGGGGGDGSPWSTSPLGQPDIKPSVVVQQGGRGDELHGPGALQQQHQQQQQQQQQQQQQQQQQQQQQRPPHLVHHAANHHPGPGAWRSAAAAAHLPPSMGASNGGLLYSQPSFTVNGMLGAGGQPAGLHHHGLRDAHDEPHHADHHPHPHSHPHQQPPPPPPPQGPPGHPGAHHDPHSDEDTPTSDDLEQFAKQFKQRRIKLGFTQADVGLALGTLYGNVFSQTTICRFEALQLSFKNMCKLKPLLNKWLEEADSSSGSPTSIDKIAAQGRKRKKRTSIEVSVKGALESHFLKCPKPSAQEITSLADSLQLEKEVVRVWFCNRRQKEKRMTPPGGTLPGAEDVYGGSRDTPPHHGVQTPVQ

SEQ ID NO: 337 - protein, 376 aa, Homo sapiens
MATAASNHYSLLTSSASIVHAEPPGGMQQGAGGYREAQSLVQGDYGALQSNGHPLSHAHQWITALSHGGDGSPWSTSPLGQPDIKPSVVVQQGGRGDELHGPGALQQQHQQQQQQQQQQQQQQQQQQQQQRPPHLVHHAANHHPGPGAWRSAAAAAHLPPSMGASNGGLLYSQPPPPPQGPPGHPGAHHDPHSDEDTPTSDDLEQFAKQFKQRRIKLGFTQADVGLALGTLYGNVFSQTTICRFEALQLSFKNMCKLKPLLNKWLEEADSSSGSPTSIDKIAAQGRKRKKRTSIEVSVKGALESHFLKCPKPSAQEITSLADSLQLEKEVVRVWFCNRRQKEKRMTPPGGTLPGAEDVYGGSRDTPPHHGVQTPVQ

SEQ ID NO: 338 - protein, 1184 aa, Homo sapiens
MEVDTEEKRHRTRSKGVRVPVEPAIQELFSCPTPGCDGSGHVSGKYARHRSVYGCPLAKKRKTQDKQPQEPAPKRKPFAVKADSSSVDECDDSDGTEDMDEKEEDEGEEYSEDNDEPGDEDEEDEEGDREEEEEIEEEDEDDDEDGEDVEDEEEEEEEEEEEEEEEENEDHQMNCHNTRIMQDTEKDDNNNDEYDNYDELVAKSLLNLGKIAEDAAYRARTESEMNSNTSNSLEDDSDKNENLGRKSELSLDLDSDVVRETVDSLKLLAQGHGVVLSENMNDRNYADSMSQQDSRNMNYVMLGKPMNNGLMEKMVEESDEEVCLSSLECLRNQCFDLARKLSETNPQERNPQQNMNIRQHVRPEEDFPGRTPDRNYSDMLNLMRLEEQLSPRSRVFASCAKEDGCHERDDDTTSVNSDRSEEVFDMTKGNLTLLEKAIALETERAKAMREKMAMEAGRRDNMRSYEDQSPRQLPGEDRKPKSSDSHVKKPYYDPSRTEKKESKCPTPGCDGTGHVTGLYPHHRSLSGCPHKDRVPPEILAMHESVLKCPTPGCTGRGHVNSNRNSHRSLSGCPIAAAEKLAKAQEKHQSCDVSKSSQASDRVLRPMCFVKQLEIPQYGYRNNVPTTTPRSNLAKELEKYSKTSFEYNSYDNHTYGKRAIAPKVQTRDISPKGYDDAKRYCKDPSPSSSSTSSYAPSSSSNLSCGGGSSASSTCSKSSFDYTHDMEAAHMAATAILNLSTRCREMPQNLSTKPQDLCATRNPDMEVDENGTLDLSMNKQRPRDSCCPILTPLEPMSPQQQAVMNNRCFQLGEGDCWDLPVDYTKMKPRRIDEDESKDITPEDLDPFQEALEERRYPGEVTIPSPKPKYPQCKESKKDLITLSGCPLADKSIRSMLATSSQELKCPTPGCDGSGHITGNYASHRSLSGCPRAKKSGIRIAQSKEDKEDQEPIRCPVPGCDGQGHITGKYASHRSASGCPLAAKRQKDGYLNGSQFSWKSVKTEGMSCPTPGCDGSGHVSGSFLTHRSLSGCPRATSAMKKAKLSGEQMLTIKQRASNGIENDEEIKQLDEEIKELNESNSQMEADMIKLRTQITTMESNLKTIEEENKVIEQQNESLLHELANLSQSLIHSLANIQLPHMDPINEQNFDAYVTTLTEMYTNQDRYQSPENKALLENIKQAVRGIQV

SEQ ID NO: 339 - protein, 1132 aa, Homo sapiens
MEVDTEEKRHRTRSKGVRVPVEPAIQELFSCPTPGCDGSGHVSGKYARHRSVYGCPLAKKRKTQDKQPQEPAPKRKPFAVKADSSSVDECDDSDGTEDMDEKEEDEEEEEEEEEENEDHQMNCHNTRIMQDTEKDDNNNDEYDNYDELVAKSLLNLGKIAEDAAYRARTESEMNSNTSNSLEDDSDKNENLGRKSELSLDLDSDVVRETVDSLKLLAQGHGVVLSENMNDRNYADSMSQQDSRNMNYVMLGKPMNNGLMEKMVEESDEEVCLSSLECLRNQCFDLARKLSETNPQERNPQQNMNIRQHVRPEEDFPGRTPDRNYSDMLNLMRLEEQLSPRSRVFASCAKEDGCHERDDDTTSVNSDRSEEVFDMTKGNLTLLEKAIALETERAKAMREKMAMEAGRRDNMRSYEDQSPRQLPGEDRKPKSSDSHVKKPYYDPSRTEKKESKCPTPGCDGTGHVTGLYPHHRSLSGCPHKDRVPPEILAMHESVLKCPTPGCTGRGHVNSNRNSHRSLSGCPIAAAEKLAKAQEKHQSCDVSKSSQASDRVLRPMCFVKQLEIPQYGYRNNVPTTTPRSNLAKELEKYSKTSFEYNSYDNHTYGKRAIAPKVQTRDISPKGYDDAKRYCKDPSPSSSSTSSYAPSSSSNLSCGGGSSASSTCSKSSFDYTHDMEAAHMAATAILNLSTRCREMPQNLSTKPQDLCATRNPDMEVDENGTLDLSMNKQRPRDSCCPILTPLEPMSPQQQAVMNNRCFQLGEGDCWDLPVDYTKMKPRRIDEDESKDITPEDLDPFQEALEERRYPGEVTIPSPKPKYPQCKESKKDLITLSGCPLADKSIRSMLATSSQELKCPTPGCDGSGHITGNYASHRSLSGCPRAKKSGIRIAQSKEDKEDQEPIRCPVPGCDGQGHITGKYASHRSASGCPLAAKRQKDGYLNGSQFSWKSVKTEGMSCPTPGCDGSGHVSGSFLTHRSLSGCPRATSAMKKAKLSGEQMLTIKQRASNGIENDEEIKQLDEEIKELNESNSQMEADMIKLRTQITTMESNLKTIEEENKVIEQQNESLLHELANLSQSLIHSLANIQLPHMDPINEQNFDAYVTTLTEMYTNQDRYQSPENKALLENIKQAVRGIQV

SEQ ID NO: 340 - protein, 1186 aa, Homo sapiens
MEVDTEEKRHRTRSKGVRVPVEPAIQELFSCPTPGCDGSGHVSGKYARHRSVYGCPLAKKRKTQDKQPQEPAPKRKPFAVKADSSSVDECDDSDGTEDMDEKEEDEGEEYSEDNDEPGDEDEEDEEGDREEEEEIEEEDEDDDEDGEDVEDEEEEEEEEEEEEEEEENEDHQMNCHNTRIMQDTEKDDNNNDEYDNYDELVAKSLLNLGKIAEDAAYRARTESEMNSNTSNSLEDDSDKNENLGRKSELSLDLDSDVVRETVDSLKLLAQGHGVVLSENMNDRNYADSMSQQDSRNMNYVMLGKPMNNGLMEKMVEESDEEVCLSSLECLRNQCFDLARKLSETNPQERNPQQNMNIRQHVRPEEDFPGRTPDRNYSDMLNLMRLEEQLSPRSRVFASCAKEDGCHERDDDTTSVNSDRSEEVFDMTKGNLTLLEKAIALETERAKAMREKMAMEAGRRDNMRSYEDQSPRQLPGEDRKPKSSDSHVKKPYYGKDPSRTEKKESKCPTPGCDGTGHVTGLYPHHRSLSGCPHKDRVPPEILAMHESVLKCPTPGCTGRGHVNSNRNSHRSLSGCPIAAAEKLAKAQEKHQSCDVSKSSQASDRVLRPMCFVKQLEIPQYGYRNNVPTTTPRSNLAKELEKYSKTSFEYNSYDNHTYGKRAIAPKVQTRDISPKGYDDAKRYCKDPSPSSSSTSSYAPSSSSNLSCGGGSSASSTCSKSSFDYTHDMEAAHMAATAILNLSTRCREMPQNLSTKPQDLCATRNPDMEVDENGTLDLSMNKQRPRDSCCPILTPLEPMSPQQQAVMNNRCFQLGEGDCWDLPVDYTKMKPRRIDEDESKDITPEDLDPFQEALEERRYPGEVTIPSPKPKYPQCKESKKDLITLSGCPLADKSIRSMLATSSQELKCPTPGCDGSGHITGNYASHRSLSGCPRAKKSGIRIAQSKEDKEDQEPIRCPVPGCDGQGHITGKYASHRSASGCPLAAKRQKDGYLNGSQFSWKSVKTEGMSCPTPGCDGSGHVSGSFLTHRSLSGCPRATSAMKKAKLSGEQMLTIKQRASNGIENDEEIKQLDEEIKELNESNSQMEADMIKLRTQITTMESNLKTIEEENKVIEQQNESLLHELANLSQSLIHSLANIQLPHMDPINEQNFDAYVTTLTEMYTNQDRYQSPENKALLENIKQAVRGIQV

SEQ ID NO: 341 - protein, 184 aa, Homo sapiens
MSCPTPGCDGSGHVSGSFLTHRSLSGCPRATSAMKKAKLSGEQMLTIKQRASNGIENDEEIKQLDEEIKELNESNSQMEADMIKLRTQVTITTMESNLKTIEEENKVIEQQNESLLHELANLSQSLIHSLANIQLPHMDPINEQNFDAYVTTLTEMYTNQDRYQSPENKALLENIKQAVRGIQV

SEQ ID NO: 342 - protein, 320 aa, Homo sapiens
MELLSPPLRDVDLTAPDGSLCSFATTDDFYDDPCFDSPDLRFFEDLDPRLMHVGALLKPEEHSHFPAAVHPAPGAREDEHVRAPSGHHQAGRCLLWACKACKRKTTNADRRKAATMRERRRLSKVNEAFETLKRCTSSNPNQRLPKVEILRNAIRYIEGLQALLRDQDAAPPGAAAAFYAPGPLPPGRGGEHYSGDSDASSPRSNCSDGMMDYSGPPSGARRRNCYEGAYYNEAPSEPRPGKSAAVSSLDCLSSIVERISTESPAAPALLLADVPSESPPRRQEAAAPSEGESSGDPTQSPDAAPQCPAGANPNPIYQVL

SEQ ID NO: 343 - protein, 358 aa, Homo sapiens
MESADFYEAEPRPPMSSHLQSPPHAPSSAAFGFPRGAGPAQPPAPPAAPEPLGGICEHETSIDISAYIDPAAFNDEFLADLFQHSRQQEKAKAAVGPTGGGGGGDFDYPGAPAGPGGAVMPGGAHGPPPGYGCAAAGYLDGRLEPLYERVGAPALRPLVIKQEPREEDEAKQLALAGLFPYQPPPPPPPSHPHPHPPPAHLAAPHLQFQIAHCGQTTMHLQPGHPTPPPTPVPSPHPAPALGAAGLPGPGSALKGLGAAHPDLRASGGSGAGKAKKSVDKNSNEYRVRRERNNIAVRKSRDKAKQRNVETQQKVLELTSDNDRLRKRVEQLSRELDTLRGIFRQLPESSLVKAMGNCA

SEQ ID NO: 344 - protein, 270 aa, Homo sapiens
MLQACKMEGFPLVPPPSEDLVPYDTDLYQRQTHEYYPYLSSDGESHSDHYWDFHPHHVHSEFESFAENNFTELQSVQPPQLQQLYRHMELEQMHVLDTPMVPPHPSLGHQVSYLPRMCLQYPSLSPAQPSSDEEEGERQSPPLEVSDGEADGLEPGPGLLPGETGSKKKIRLYQFLLDLLRSGDMKDSIWWVDKDKGTFQFSSKHKEALAHRWGIQKGNRKKMTYQKMARALRNYGKTGEVKKVKKKLTYQFSGEVLGRGGLAERRHPPH

SEQ ID NO: 345 - protein, 271 aa, Homo sapiens
MLQACKMEGFPLVPPQPSEDLVPYDTDLYQRQTHEYYPYLSSDGESHSDHYWDFHPHHVHSEFESFAENNFTELQSVQPPQLQQLYRHMELEQMHVLDTPMVPPHPSLGHQVSYLPRMCLQYPSLSPAQPSSDEEEGERQSPPLEVSDGEADGLEPGPGLLPGETGSKKKIRLYQFLLDLLRSGDMKDSIWWVDKDKGTFQFSSKHKEALAHRWGIQKGNRKKMTYQKMARALRNYGKTGEVKKVKKKLTYQFSGEVLGRGGLAERRHPPH

SEQ ID NO: 346 - protein, 1092 aa, Homo sapiens
FCAYSAKIYYKVIKDIEPGEELLVHVKEGVYPLGTVPPGLDEEPTFRCDECDELFQSKLDLRRHKKYTCGSVGAALYEGLAEELKPEGLGGGSGQAHECKDCERMFPNKYSLEQHMVIHTEEREYKCDQCPKAFNWKSNLIRHQMSHDSGKRFECENCVKVFTDPSNLQRHIRSQHVGARAHACPDCGKTFATSSGLKQHKHIHSTVKPFICEVCHKSYTQFSNLCRHKRMHADCRTQIKCKDCGQMFSTTSSLNKHRRFCEGKNHYTPGGIFAPGLPLTPSPMMDKAKPSPSLNHASLGFNEYFPSRPHPGSLPFSTAPPTFPALTPGFPGIFPPSLYPRPPLLPPTSLLKSPLNHTQDAKLPSPLGNPALPLVSAVSNSSQGTTAAAGPEEKFESRLEDSCVEKLKTRSSDMSDGSDFEDVNTTTGTDLDTTTGTGSDLDSDVDSDPDKDKGKGKSAEGQPKFGGGLAPPGAPNSVAEVPVFYSQHSFFPPPDEQLLTATGAAGDSIKAIASIAEKYFGPGFMGMQEKKLGSLPYHSAFPFQFLPNFPHSLYPFTDRALAHNLLVKAEPKSPRDALKVGGPSAECPFDLTTKPKDVKPILPMPKGPSAPASGEEQPLDLSIGSRARASQNGGGREPRKNHVYGERKLGAGEGLPQVCPARMPQQPPLHYAKPSPFFMDPIYSRVEKRKVTDPVGALKEKYLRPSPLLFHPQMSAIETMTEKLESFAAMKADSGSSLQPLPHHPFNFRSPPPTLSDPILRKGKERYTCRYCGKIFPRSANLTRHLRTHTGEQPYRCKYCDRSFSISSNLQRHVRNIHNKEKPFKCHLCNRCFGQQTNLDRHLKKHEHENAPVSQHPGVLTNHLGTSASSPTSESDNHALLDEKEDSYFSEIRNFIANSEMNQASTRTEKRADMQIVDGSAQCPGLASEKQEDVEEEDDDDLEEDDEDSLAGKSQDDTVSPAPEPQAAYEDEEDEEPAASLAVGFDHTRRCAEDHEGGLLALEPMPTFGKGLDLRRAAEEAFEVKDVLNSTLDSEALKHTLCRQAKNQAYAMMLSLSEDTPLHTPSQGSLDAWLKVTGATSESGAFHPINHL

SEQ ID NO: 347 - protein, 1276 aa, Homo sapiens
MRSKARARKLAKSDGDVVNNMYEPNRDLLASHSAEDEAEDSAMSPIPVGPPSPFPTSEDFTPKEGSPYEAPVYIPEDIPIPADFELRESSIPGAGLGVWAKRKMEAGERLGPCVVVPRAAAKETDFGWEQILTDVEVSPQEGCITKISEDLGSEKFCVDANQAGAGSWLKYIRVACSCDDQNLTMCQISEQVIYYKVIKDIEPGEELLVHVKEGVYPLGTVPPGLDEEPTFRCDECDELFQSKLDLRRHKKYTCGSVGAALYEGLAEELKPEGLGGGSGQAHECKDCERMFPNKYSLEQHMVIHTEEREYKCDQCPKAFNWKSNLIRHQMSHDSGKRFECENCVKVFTDPSNLQRHIRSQHVGARAHACPDCGKTFATSSGLKQHKHIHSTVKPFICEVCHKSYTQFSNLCRHKRMHADCRTQIKCKDCGQMFSTTSSLNKHRRFCEGKNHYTPGGIFAPGLPLTPSPMMDKAKPSPSLNHASLGFNEYFPSRPHPGSLPFSTAPPTFPALTPGFPGIFPPSLYPRPPLLPPTSLLKSPLNHTQDAKLPSPLGNPALPLVSAVSNSSQGTTAAAGPEEKFESRLEDSCVEKLKTRSSDMSDGSDFEDVNTTTGTDLDTTTGTGSDLDSDVDSDPDKDKGKGKSAEGQPKFGGGLAPPGAPNSVAEVPVFYSQHSFFPPPDEQLLTATGAAGDSIKAIASIAEKYFGPGFMGMQEKKLGSLPYHSAFPFQFLPNFPHSLYPFTDRALAHNLLVKAEPKSPRDALKVGGPSAECPFDLTTKPKDVKPILPMPKGPSAPASGEEQPLDLSIGSRARASQNGGGREPRKNHVYGERKLGAGEGLPQVCPARMPQQPPLHYAKPSPFFMDPIYRVEKRKVTDPVGALKEKYLRPSPLLFHPQMSAIETMTEKLESFAAMKADSGSSLQPLPHHPFNFRSPPPTLSDPILRKGKERYTCRYCGKIFPRSANLTRHLRTHTGEQPYRCKYCDRSFSISSNLQRHVRNIHNKEKPFKCHLCNRCFGQQTNLDRHLKKHEHENAPVSQHPGVLTNHLGTSASSPTSESDNHALLDEKEDSYFSEIRNFIANSEMNQASTRTEKRADMQIVDGSAQCPGLASEKQEDVEEEDDDDLEEDDEDSLAGKSQDDTVSPAPEPQAAYEDEEDEEPAASLAVGFDHTRRCAEDHEGGLLALEPMPTFGKGLDLRRAAEEAFEVKDVLNSTLDSEALKHTLCRQAKNQAYAMMLSLSEDTPLHTPSQGSLDAWLKVTGATSESGAFHPINHL

SEQ ID NO: 348 - protein, 1084 aa, Homo sapiens
IYYKVIKDIEPGEELLVHVKEGVYPLGTVPPGLDEEPTFRCDECDELFQSKLDLRRHKKYTCGSVGAALYEGLAEELKPEGLGGGSGQAHECKDCERMFPNKYSLEQHMVIHTEEREYKCDQCPKAFNWKSNLIRHQMSHDSGKRFECENCVKVFTDPSNLQRHIRSQHVGARAHACPDCGKTFATSSGLKQHKHIHSTVKPFICEVCHKSYTQFSNLCRHKRMHADCRTQIKCKDCGQMFSTTSSLNKHRRFCEGKNHYTPGGIFAPGLPLTPSPMMDKAKPSPSLNHASLGFNEYFPSRPHPGSLPFSTAPPTFPALTPGFPGIFPPSLYPRPPLLPPTSLLKSPLNHTQDAKLPSPLGNPALPLVSAVSNSSQGTTAAAGPEEKFESRLEDSCVEKLKTRSSDMSDGSDFEDVNTTTGTDLDTTTGTGSDLDSDVDSDPDKDKGKGKSAEGQPKFGGGLAPPGAPNSVAEVPVFYSQHSFFPPPDEQLLTATGAAGDSIKAIASIAEKYFGPGFMGMQEKKLGSLPYHSAFPFQFLPNFPHSLYPFTDRALAHNLLVKAEPKSPRDALKVGGPSAECPFDLTTKPKDVKPILPMPKGPSAPASGEEQPLDLSIGSRARASQNGGGREPRKNHVYGERKLGAGEGLPQVCPARMPQQPPLHYAKPSPFFMDPIYRVEKRKVTDPVGALKEKYLRPSPLLFHPQMSAIETMTEKLESFAAMKADSGSSLQPLPHHPFNFRSPPPTLSDPILRKGKERYTCRYCGKIFPRSANLTRHLRTHTGEQPYRCKYCDRSFSISSNLQRHVRNIHNKEKPFKCHLCNRCFGQQTNLDRHLKKHEHENAPVSQHPGVLTNHLGTSASSPTSESDNHALLDEKEDSYFSEIRNFIANSEMNQASTRTEKRADMQIVDGSAQCPGLASEKQEDVEEEDDDDLEEDDEDSLAGKSQDDTVSPAPEPQAAYEDEEDEEPAASLAVGFDHTRRCAEDHEGGLLALEPMPTFGKGLDLRRAAEEAFEVKDVLNSTLDSEALKHTLCRQAKNQAYAMMLSLSEDTPLHTPSQGSLDAWLKVTGATSESGAFHPINHL

SEQ ID NO: 349 - protein, 1276 aa, Homo sapiens
MRSKARARKLAKSDGDVVNNMYEPNRDLLASHSAEDEAEDSAMSPIPVGPPSPFPTSEDFTPKEGSPYEAPVYIPEDIPIPADFELRESSIPGAGLGVWAKRKMEAGERLGPCVVVPRAAAKETDFGWEQILTDVEVSPQEGCITKISEDLGSEKFCVDANQAGAGSWLKYIRVACSCDDQNLTMCQISEQIYYKVIKDIEPGEELLVHVKEGVYPLGTVPPGLDEEPTFRCDECDELFQSKLDLRRHKKYTCGSVGAALYEGLAEELKPEGLGGGSGQAHECKDCERMFPNKYSLEQHMVIHTEEREYKCDQCPKAFNWKSNLIRHQMSHDSGKRFECENCVKVFTDPSNLQRHIRSQHVGARAHACPDCGKTFATSSGLKQHKHIHSTVKPFICEVCHKSYTQFSNLCRHKRMHADCRTQIKCKDCGQMFSTTSSLNKHRRFCEGKNHYTPGGIFAPGLPLTPSPMMDKAKPSPSLNHASLGFNEYFPSRPHPGSLPFSTAPPTFPALTPGFPGIFPPSLYPRPPLLPPTSLLKSPLNHTQDAKLPSPLGNPALPLVSAVSNSSQGTTAAAGPEEKFESRLEDSCVEKLKTRSSDMSDGSDFEDVNTTTGTDLDTTTGTGSDLDSDVDSDPDKDKGKGKSAEGQPKFGGGLAPPGAPNSVAEVPVFYSQHSFFPPPDEQLLTATGAAGDSIKAIASIAEKYFGPGFMGMQEKKLGSLPYHSAFPFQFLPNFPHSLYPFTDRALAHNLLVKAEPKSPRDALKVGGPSAECPFDLTTKPKDVKPILPMPKGPSAPASGEEQPLDLSIGSRARASQNGGGREPRKNHVYGERKLGAGEGLPQVCPARMPQQPPLHYAKPSPFFMDPIYSRVEKRKVTDPVGALKEKYLRPSPLLFHPQMSAIETMTEKLESFAAMKADSGSSLQPLPHHPFNFRSPPPTLSDPILRKGKERYTCRYCGKIFPRSANLTRHLRTHTGEQPYRCKYCDRSFSISSNLQRHVRNIHNKEKPFKCHLCNRCFGQQTNLDRHLKKHEHENAPVSQHPGVLTNHLGTSASSPTSESDNHALLDEKEDSYFSEIRNFIANSEMNQASTRTEKRADMQIVDGSAQCPGLASEKQEDVEEEDDDDLEEDDEDSLAGKSQDDTVSPAPEPQAAYEDEEDEEPAASLAVGFDHTRRCAEDHEGGLLALEPMPTFGKGLDLRRAAEEAFEVKDVLNSTLDSEALKHTLCRQAKNQAYAMMLSLSEDTPLHTPSQGSLDAWLKVTGATSESGAFHPINHL

SEQ ID NO: 350 - protein, 1275 aa, Homo sapiens
MRSKARARKLAKSDGDVVNNMYEPNRDLLASHSAEDEAEDSAMSPIPVGPPSPFPTSEDFTPKEGSPYEAPVYIPEDIPIPADFELRESSIPGAGLGVWAKRKMEAGERLGPCVVVPRAAAKETDFGWEQILTDVEVSPQEGCITKISEDLGSEKFCVDANQAGAGSWLKYIRVACSCDDQNLTMCQISEQIYYKVIKDIEPGEELLVHVKEGVYPLGTVPPGLDEEPTFRCDECDELFQSKLDLRRHKKYTCGSVGAALYEGLAEELKPEGLGGGSGQAHECKDCERMFPNKYSLEQHMVIHTEEREYKCDQCPKAFNWKSNLIRHQMSHDSGKRFECENCVKVFTDPSNLQRHIRSQHVGARAHACPDCGKTFATSSGLKQHKHIHSTVKPFICEVCHKSYTQFSNLCRHKRMHADCRTQIKCKDCGQMFSTTSSLNKHRRFCEGKNHYTPGGIFAPGLPLTPSPMMDKAKPSPSLNHASLGFNEYFPSRPHPGSLPFSTAPPTFPALTPGFPGIFPPSLYPRPPLLPPTSLLKSPLNHTQDAKLPSPLGNPALPLVSAVSNSSQGTTAAAGPEEKFESRLEDSCVEKLKTRSSDMSDGSDFEDVNTTTGTDLDTTTGTGSDLDSDVDSDPDKDKGKGKSAEGQPKFGGGLAPPGAPNSVAEVPVFYSQHSFFPPPDEQLLTATGAAGDSIKAIASIAEKYFGPGFMGMQEKKLGSLPYHSAFPFQFLPNFPHSLYPFTDRALAHNLLVKAEPKSPRDALKVGGPSAECPFDLTTKPKDVKPILPMPKGPSAPASGEEQPLDLSIGSRARASQNGGGREPRKNHVYGERKLGAGEGLPQVCPARMPQQPPLHYAKPSPFFMDPIYRVEKRKVTDPVGALKEKYLRPSPLLFHPQMSAIETMTEKLESFAAMKADSGSSLQPLPHHPFNFRSPPPTLSDPILRKGKERYTCRYCGKIFPRSANLTRHLRTHTGEQPYRCKYCDRSFSISSNLQRHVRNIHNKEKPFKCHLCNRCFGQQTNLDRHLKKHEHENAPVSQHPGVLTNHLGTSASSPTSESDNHALLDEKEDSYFSEIRNFIANSEMNQASTRTEKRADMQIVDGSAQCPGLASEKQEDVEEEDDDDLEEDDEDSLAGKSQDDTVSPAPEPQAAYEDEEDEEPAASLAVGFDHTRRCAEDHEGGLLALEPMPTFGKGLDLRRAAEEAFEVKDVLNSTLDSEALKHTLCRQAKNQAYAMMLSLSEDTPLHTPSQGSLDAWLKVTGATSESGAFHPINHL

SEQ ID NO: 351 - protein, 1256 aa, Homo sapiens
MRSKARARKLAKSDGDVVNNMYEPNRDLLASHSAEDEAEDSAMSPIPVGPPSPFPTSEDFTPKEGSPYEAPVYIPEDIPIPADFELRESSIPGAGLGVWAKRKMEAGERLGPCVVVPRAAAKETDFGWEQILTDVEVSPQEGCITKISEDLGSEKFCVDANQAGAGSWLKYIRVACSCDDQNLTMCQISEQIYYKVIKDIEPGEELLVHVKEGVYPLGTVPPGLDEEPTFRCDECDELFQSKLDLRRHKKYTCGSVGAALYEGLAEELKPEGLGGGSGQAHECKDCERMFPNKYSLEQHMVIHTEEREYKCDQCPKAFNWKSNLIRHQMSHDSGKRFECENCVKVFTDPSNLQRHIRSQHVGARAHACPDCGKTFATSSGLKQHKHIHSTVKPFICEVCHKSYTQFSNLCRHKRMHADCRTQIKCKDCGQMFSTTSSLNKHRRFCEGKNHYTPGGIFAPGLPLTPSPMMDKAKPSPSLNHASLGFNEYFPSRPHPGSLPFSTAPPTFPALTPGFPGIFPPSLYPRPPLLPPTSLLKSPLNHTQDAKLPSPLGNPALPLVSAVSNSSQGTTAAAGPEEKFESRLEDSCVEKLKTRSSDMSDGSDFEDVNTTTGTDLDTTTGTGSDLDSDVDSDPDKDKGKGKSAEGQPKFGGGLAPPGAPNSVAEVPVFYSQHSFFPPPDEQLLTATGAAGDSIKAIASIAEKYFGPGFMGMQEKKLGSLPYHSAFPFQFLPNFPHSLYPFTDRALAHNLLVKAEPKSPRDALKVGGPSAECPFDLTTKPKDVKPILPMPKGPSAPASGEEQPLDLSIGSRARASQNGGGREPRKNHVYGERKLGAGEGLPQVCPARMPQQPPLHYAKPSPFFMDPIYRVEKRKVTDPVGALKEKYLRPSPLLFHPQMSAIETMTEKLESFAAMKADSGSSLQPLPHHPFNFRSPPPTLSDPILRKGKERYTCRYCGKIFPRSANLTRHLRTHTGEQPYRCKYCDRSFSISSNLQRHVRNIHNKEKPFKCHLCNRCFGQQTNLDRHLKKHEHENAPVSQHPGVLTNHLGTSASSPTSESDNHALLDEKEDSYFSEIRNFIANSEMNQASTRTEKRADMQIVDGSAQCPGLASEKQEDVEEEDDDDLEEDDEDSLAGKSQDDTVSPAPEPQAAYEDEEDEEPAASLAVGFDHTRRCAEDHEGGLLALEPMPTFGKGLDLRRAAEEAFEVKDVLNSTLDSEALKHTLCRQAKNQGSLDAWLKVTGATSESGAFHPINHL

SEQ ID NO: 352 - protein, 417 aa, Homo sapiens
MRLSKTLVDMDMADYSAALDPAYTTLEFENVQVLTMGNDTSPSEGTNLNAPNSLGVSALCAICGDRATGKHYGASSCDGCKGFFRRSVRKNHMYSCRFSRQCVVDKDKRNQCRYCRLKKCFRAGMKKEAVQNERDRISTRRSSYEDSSLPSINALLQAEVLSRQITSPVSGINGDIRAKKIASIADVCESMKEQLLVLVEWAKYIPAFCELPLDDQVALLRAHAGEHLLLGATKRSMVFKDVLLLGNDYIVPRHCPELAEMSRVSIRILDELVLPFQELQIDDNEYAYLKAIIFFDPDAKGLSDPGKIKRLRSQVQVSLEDYINDRQYDSRGRFGELLLLLPTLQSITWQMIEQIQFIKLFGMAKIDNLLQEMLLGGPCQAQEGRGWSGDSPGDRPHTVSSPLSSLASPLCRFGQVA

SEQ ID NO: 353 - protein, 474 aa, Homo sapiens
MRLSKTLVDMDMADYSAALDPAYTTLEFENVQVLTMGNDTSPSEGTNLNAPNSLGVSALCAICGDRATGKHYGASSCDGCKGFFRRSVRKNHMYSCRFSRQCVVDKDKRNQCRYCRLKKCFRAGMKKEAVQNERDRISTRRSSYEDSSLPSINALLQAEVLSRQITSPVSGINGDIRAKKIASIADVCESMKEQLLVLVEWAKYIPAFCELPLDDQVALLRAHAGEHLLLGATKRSMVFKDVLLLGNDYIVPRHCPELAEMSRVSIRILDELVLPFQELQIDDNEYAYLKAIIFFDPDAKGLSDPGKIKRLRSQVQVSLEDYINDRQYDSRGRFGELLLLLPTLQSITWQMIEQIQFIKLFGMAKIDNLLQEMLLGGSPSDAPHAHHPLHPHLMQEHMGTNVIVANTMPTHLSNGQMCEWPRPRGQAATPETPQPSPPGGSGSEPYKLLPGAVATIVKPLSAIPQPTITKQEVI

SEQ ID NO: 354 - protein, 452 aa, Homo sapiens
MVSVNAPLGAPVESSYDTSPSEGTNLNAPNSLGVSALCAICGDRATGKHYGASSCDGCKGFFRRSVRKNHMYSCRFSRQCVVDKDKRNQCRYCRLKKCFRAGMKKEAVQNERDRISTRRSSYEDSSLPSINALLQAEVLSRQITSPVSGINGDIRAKKIASIADVCESMKEQLLVLVEWAKYIPAFCELPLDDQVALLRAHAGEHLLLGATKRSMVFKDVLLLGNDYIVPRHCPELAEMSRVSIRILDELVLPFQELQIDDNEYAYLKAIIFFDPDAKGLSDPGKIKRLRSQVQVSLEDYINDRQYDSRGRFGELLLLLPTLQSITWQMIEQIQFIKLFGMAKIDNLLQEMLLGGSPSDAPHAHHPLHPHLMQEHMGTNVIVANTMPTHLSNGQMCEWPRPRGQAATPETPQPSPPGGSGSEPYKLLPGAVATIVKPLSAIPQPTITKQEVI

SEQ ID NO: 355 - protein, 504 aa, Homo sapiens
MRLSKTLVDMDMADYSAALDPAYTTLEFENVQVLTMGNVLLPLRLARLRHPLRHHWSISGGVDSSPQGDTSPSEGTNLNAPNSLGVSALCAICGDRATGKHYGASSCDGCKGFFRRSVRKNHMYSCRFSRQCVVDKDKRNQCRYCRLKKCFRAGMKKEAVQNERDRISTRRSSYEDSSLPSINALLQAEVLSRQITSPVSGINGDIRAKKIASIADVCESMKEQLLVLVEWAKYIPAFCELPLDDQVALLRAHAGEHLLLGATKRSMVFKDVLLLGNDYIVPRHCPELAEMSRVSIRILDELVLPFQELQIDDNEYAYLKAIIFFDPDAKGLSDPGKIKRLRSQVQVSLEDYINDRQYDSRGRFGELLLLLPTLQSITWQMIEQIQFIKLFGMAKIDNLLQEMLLGGSPSDAPHAHHPLHPHLMQEHMGTNVIVANTMPTHLSNGQMCEWPRPRGQAATPETPQPSPPGGSGSEPYKLLPGAVATIVKPLSAIPQPTITKQEVI

SEQ ID NO: 356 - protein, 442 aa, Homo sapiens
MVSVNAPLGAPVESSYDTSPSEGTNLNAPNSLGVSALCAICGDRATGKHYGASSCDGCKGFFRRSVRKNHMYSCRFSRQCVVDKDKRNQCRYCRLKKCFRAGMKKEAVQNERDRISTRRSSYEDSSLPSINALLQAEVLSRQITSPVSGINGDIRAKKIASIADVCESMKEQLLVLVEWAKYIPAFCELPLDDQVALLRAHAGEHLLLGATKRSMVFKDVLLLGNDYIVPRHCPELAEMSRVSIRILDELVLPFQELQIDDNEYAYLKAIIFFDPDAKGLSDPGKIKRLRSQVQVSLEDYINDRQYDSRGRFGELLLLLPTLQSITWQMIEQIQFIKLFGMAKIDNLLQEMLLGGSPSDAPHAHHPLHPHLMQEHMGTNVIVANTMPTHLSNGQMSTPETPQPSPPGGSGSEPYKLLPGAVATIVKPLSAIPQPTITKQEVI

SEQ ID NO: 357 - protein, 464 aa, Homo sapiens
MRLSKTLVDMDMADYSAALDPAYTTLEFENVQVLTMGNDTSPSEGTNLNAPNSLGVSALCAICGDRATGKHYGASSCDGCKGFFRRSVRKNHMYSCRFSRQCVVDKDKRNQCRYCRLKKCFRAGMKKEAVQNERDRISTRRSSYEDSSLPSINALLQAEVLSRQITSPVSGINGDIRAKKIASIADVCESMKEQLLVLVEWAKYIPAFCELPLDDQVALLRAHAGEHLLLGATKRSMVFKDVLLLGNDYIVPRHCPELAEMSRVSIRILDELVLPFQELQIDDNEYAYLKAIIFFDPDAKGLSDPGKIKRLRSQVQVSLEDYINDRQYDSRGRFGELLLLLPTLQSITWQMIEQIQFIKLFGMAKIDNLLQEMLLGGSPSDAPHAHHPLHPHLMQEHMGTNVIVANTMPTHLSNGQMSTPETPQPSPPGGSGSEPYKLLPGAVATIVKPLSAIPQPTITKQEVI

SEQ ID NO: 358 - protein, 247 aa, Homo sapiens
MTILFLTMVISYFGCMKAAPMKEANIRGQGGLAYPGVRTHGTLESVNGPKAGSRGLTSLADTFEHVIEELLDEDQKVRPNEENNKDADLYTSRVMLSSQVPLEPPLLFLLEEYKNYLDAANMSMRVRRHSDPARRGELSVCDSISEWVTAADKKTAVDMSGGTVTVLEKVPVSKGQLKQYFYETKCNPMGYTKEGCRGIDKRHWNSQCRTTQSYVRALTMDSKKRIGWRFIRIDTSCVCTLTIKRGR

SEQ ID NO: 359 - protein, 247 aa, Homo sapiens; identical to SEQ ID NO: 358

SEQ ID NO: 360 - protein, 329 aa, Homo sapiens
MCGATSFLHECTRLILVTTQNAEFLQKGLQVHTCFGVYPHASVWHDCASQKKGCAVYLHVSVEFNKLIPENGFIKFHQVRRVMTILFLTMVISYFGCMKAAPMKEANIRGQGGLAYPGVRTHGTLESVNGPKAGSRGLTSLADTFEHVIEELLDEDQKVRPNEENNKDADLYTSRVMLSSQVPLEPPLLFLLEEYKNYLDAANMSMRVRRHSDPARRGELSVCDSISEWVTAADKKTAVDMSGGTVTVLEKVPVSKGQLKQYFYETKCNPMGYTKEGCRGIDKRHWNSQCRTTQSYVRALTMDSKKRIGWRFIRIDTSCVCTLTIKRGR

SEQ ID NO: 361 - protein, 247 aa, Homo sapiens; identical to SEQ ID NO: 358

SEQ ID NO: 362 - protein, 247 aa, Homo sapiens; identical to SEQ ID NO: 358

SEQ ID NO: 363 - protein, 247 aa, Homo sapiens; identical to SEQ ID NO: 358

SEQ ID NO: 364 - protein, 247 aa, Homo sapiens; identical to SEQ ID NO: 358

SEQ ID NO: 365 - protein, 247 aa, Homo sapiens; identical to SEQ ID NO: 358

SEQ ID NO: 366 - protein, 247 aa, Homo sapiens; identical to SEQ ID NO: 358

SEQ ID NO: 367 - protein, 247 aa, Homo sapiens; identical to SEQ ID NO: 358

SEQ ID NO: 368 - protein, 262 aa, Homo sapiens
MQSREEEWFHQVRRVMTILFLTMVISYFGCMKAAPMKEANIRGQGGLAYPGVRTHGTLESVNGPKAGSRGLTSLADTFEHVIEELLDEDQKVRPNEENNKDADLYTSRVMLSSQVPLEPPLLFLLEEYKNYLDAANMSMRVRRHSDPARRGELSVCDSISEWVTAADKKTAVDMSGGTVTVLEKVPVSKGQLKQYFYETKCNPMGYTKEGCRGIDKRHWNSQCRTTQSYVRALTMDSKKRIGWRFIRIDTSCVCTLTIKRGR

SEQ ID NO: 369 - protein, 247 aa, Homo sapiens; identical to SEQ ID NO: 358

SEQ ID NO: 370 - protein, 247 aa, Homo sapiens; identical to SEQ ID NO: 358

SEQ ID NO: 371 - protein, 247 aa, Homo sapiens; identical to SEQ ID NO: 358

SEQ ID NO: 372 - protein, 247 aa, Homo sapiens; identical to SEQ ID NO: 358

SEQ ID NO: 373 - protein, 247 aa, Homo sapiens; identical to SEQ ID NO: 358

SEQ ID NO: 374 - protein, 255 aa, Homo sapiens
MFHQVRRVMTILFLTMVISYFGCMKAAPMKEANIRGQGGLAYPGVRTHGTLESVNGPKAGSRGLTSLADTFEHVIEELLDEDQKVRPNEENNKDADLYTSRVMLSSQVPLEPPLLFLLEEYKNYLDAANMSMRVRRHSDPARRGELSVCDSISEWVTAADKKTAVDMSGGTVTVLEKVPVSKGQLKQYFYETKCNPMGYTKEGCRGIDKRHWNSQCRTTQSYVRALTMDSKKRIGWRFIRIDTSCVCTLTIKRGR

SEQ ID NO: 375 - protein, 270 aa, Homo sapiens
MVTFATILQVNKVMSILFYVIFLAYLRGIQGNNMDQRSLPEDSLNSLIIKLIQADILKNKLSKQMVDVKENYQSTLPKAEAPREPERGGPAKSAFQPVIAMDTELLRQQRRYNSPRVLLSDSTPLEPPPLYLMEDYVGSPVVANRTSRRKRYAEHKSHRGEYSVCDSESLWVTDKSSAIDIRGHQVTVLGEIKTGNSPVKQYFYETRCKEARPVKNGCRGIDDKHWNSQCKTSQTYVRALTSENNKLVGWRWIRIDTSCVCALSRKIGRT

SEQ ID NO: 376 - protein, 257 aa, Homo sapiens
MSILFYVIFLAYLRGIQGNNMDQRSLPEDSLNSLIIKLIQADILKNKLSKQMVDVKENYQSTLPKAEAPREPERGGPAKSAFQPVIAMDTELLRQQRRYNSPRVLLSDSTPLEPPPLYLMEDYVGSPVVANRTSRRKRYAEHKSHRGEYSVCDSESLWVTDKSSAIDIRGHQVTVLGEIKTGNSPVKQYFYETRCKEARPVKNGCRGIDDKHWNSQCKTSQTYVRALTSENNKLVGWRWIRIDTSCVCALSRKIGRT

SEQ ID NO: 377 - protein, 210 aa, Homo sapiens
MLPLPSCSLPILLLFLLPSVPIESQPPPSTLPPFLAPEWDLLSPRVVLSRGAPAGPPLLFLLEAGAFRESAGAPANRSRRGVSETAPASRRGELAVCDAVSGWVTDRRTAVDLRGREVEVLGEVPAAGGSPLRQYFFETRCKADNAEEGGPGAGGGGCRGVDRRHWVSECKAKQSYVRALTADAQGRVGWRWIRIDTACVCTLLSRTGRA

SEQ ID NO: 378 - protein, 1165 aa, Homo sapiens
MLLTLIILLPVVSKFSFVSLSAPQHWSCPEGTLAGNGNSTCVGPAPFLIFSHGNSIFRIDTEGTNYEQLVVDAGVSVIMDFHYNEKRIYWVDLERQLLQRVFLNGSRQERVCNIEKNVSGMAINWINEEVIWSNQQEGIITVTDMKGNNSHILLSALKYPANVAVDPVERFIFWSSEVAGSLYRADLDGVGVKALLETSEKITAVSLDVLDKRLFWIQYNREGSNSLICSCDYDGGSVHISKHPTQHNLFAMSLFGDRIFYSTWKMKTIWIANKHTGKDMVRINLHSSFVPLGELKVVHPLAQPKAEDDTWEPDVNECAFWNHGCTLGCKNTPGSYYCTCPVGFVLLPDGKRCHQLVSCPRNVSECSHDCVLTSEGPLCFCPEGSVLERDGKTCSGCSSPDNGGCSQLCVPLSPVSWECDCFPGYDLQLDEKSCAASGPQPFLLFANSQDIRHMHFDGTDYGTLLSQQMGMVYALDHDPVENKIYFAHTALKWIERANMDGSQRERLIEEGVDVPEGLAVDWIGRRFYWTDRGKSLIGRSDLNGKRSKIITKENISQPRGIAVHPMAKRLFWTDTGINPRIESSSLQGLGRLVIASSDLIWPSGITIDFLTDKLYWCDAKQSVIEMANLDGSKRRRLTQNDVGHPFAVAVFEDYVWFSDWAMPSVMRVNKRTGKDRVRLQGSMLKPSSLVVVHPLAKPGADPCLYQNGGCEHICKKRLGTAWCSCREGFMKASDGKTCLALDGHQLLAGGEVDLKNQVTPLDILSKTRVSEDNITESQHMLVAEIMVSDQDDCAPVGCSMYARCISEGEDATCQCLKGFAGDGKLCSDIDECEMGVPVCPPASSKCINTEGGYVCRCSEGYQGDGIHCLDIDECQLGEHSCGENASCTNTEGGYTCMCAGRLSEPGLICPDSTPPPHLREDDHHYSVRNSDSECPLSHDGYCLHDGVCMYIEALDKYACNCVVGYIGERCQYRDLKWWELRHAGHGQQQKVIVVAVCVVVLVMLLLLSLWGAHYYRTQKLLSKNPKNPYEESSRDVRSRRPADTEDGMSSCPQPWFVVIKEHQDLKNGGQPVAGEDGQAADGSMQPTSWRQEPQLCGMGTEQGCWIPVSSDKGSCPQVMERSFHMPSYGTQTLEGGVEKPHSLLSANPLWQQRALDPPHQMELTQ

SEQ ID NO: 379 - protein, 1207 aa, Homo sapiens
MLLTLIILLPVVSKFSFVSLSAPQHWSCPEGTLAGNGNSTCVGPAPFLIFSHGNSIFRIDTEGTNYEQLVVDAGVSVIMDFHYNEKRIYWVDLERQLLQRVFLNGSRQERVCNIEKNVSGMAINWINEEVIWSNQQEGIITVTDMKGNNSHILLSALKYPANVAVDPVERFIFWSSEVAGSLYRADLDGVGVKALLETSEKITAVSLDVLDKRLFWIQYNREGSNSLICSCDYDGGSVHISKHPTQHNLFAMSLFGDRIFYSTWKMKTIWIANKHTGKDMVRINLHSSFVPLGELKVVHPLAQPKAEDDTWEPEQKLCKLRKGNCSSTVCGQDLQSHLCMCAEGYALSRDRKYCEDVNECAFWNHGCTLGCKNTPGSYYCTCPVGFVLLPDGKRCHQLVSCPRNVSECSHDCVLTSEGPLCFCPEGSVLERDGKTCSGCSSPDNGGCSQLCVPLSPVSWECDCFPGYDLQLDEKSCAASGPQPFLLFANSQDIRHMHFDGTDYGTLLSQQMGMVYALDHDPVENKIYFAHTALKWIERANMDGSQRERLIEEGVDVPEGLAVDWIGRRFYWTDRGKSLIGRSDLNGKRSKIITKENISQPRGIAVHPMAKRLFWTDTGINPRIESSSLQGLGRLVIASSDLIWPSGITIDFLTDKLYWCDAKQSVIEMANLDGSKRRRLTQNDVGHPFAVAVFEDYVWFSDWAMPSVMRVNKRTGKDRVRLQGSMLKPSSLVVVHPLAKPGADPCLYQNGGCEHICKKRLGTAWCSCREGFMKASDGKTCLALDGHQLLAGGEVDLKNQVTPLDILSKTRVSEDNITESQHMLVAEIMVSDQDDCAPVGCSMYARCISEGEDATCQCLKGFAGDGKLCSDIDECEMGVPVCPPASSKCINTEGGYVCRCSEGYQGDGIHCLDIDECQLGEHSCGENASCTNTEGGYTCMCAGRLSEPGLICPDSTPPPHLREDDHHYSVRNSDSECPLSHDGYCLHDGVCMYIEALDKYACNCVVGYIGERCQYRDLKWWELRHAGHGQQQKVIVVAVCVVVLVMLLLLSLWGAHYYRTQKLLSKNPKNPYEESSRDVRSRRPADTEDGMSSCPQPWFVVIKEHQDLKNGGQPVAGEDGQAADGSMQPTSWRQEPQLCGMGTEQGCWIPVSSDKGSCPQVMERSFHMPSYGTQTLEGGVEKPHSLLSANPLWQQRALDPPHQMELTQ

SEQ ID NO: 380 - protein, 1166 aa, Homo sapiens
MLLTLIILLPVVSKFSFVSLSAPQHWSCPEGTLAGNGNSTCVGPAPFLIFSHGNSIFRIDTEGTNYEQLVVDAGVSVIMDFHYNEKRIYWVDLERQLLQRVFLNGSRQERVCNIEKNVSGMAINWINEEVIWSNQQEGIITVTDMKGNNSHILLSALKYPANVAVDPVERFIFWSSEVAGSLYRADLDGVGVKALLETSEKITAVSLDVLDKRLFWIQYNREGSNSLICSCDYDGGSVHISKHPTQHNLFAMSLFGDRIFYSTWKMKTIWIANKHTGKDMVRINLHSSFVPLGELKVVHPLAQPKAEDDTWEPEQKLCKLRKGNCSSTVCGQDLQSHLCMCAEGYALSRDRKYCEDVNECAFWNHGCTLGCKNTPGSYYCTCPVGFVLLPDGKRCHQLVSCPRNVSECSHDCVLTSEGPLCFCPEGSVLERDGKTCSGCSSPDNGGCSQLCVPLSPVSWECDCFPGYDLQLDEKSCAASGPQPFLLFANSQDIRHMHFDGTDYGTLLSQQMGMVYALDHDPVENKIYFAHTALKWIERANMDGSQRERLIEEGVDVPEGLAVDWIGRRFYWTDRGKSLIGRSDLNGKRSKIITKENISQPRGIAVHPMAKRLFWTDTGINPRIESSSLQGLGRLVIASSDLIWPSGITIDFLTDKLYWCDAKQSVIEMANLDGSKRRRLTQNDVGHPFAVAVFEDYVWFSDWAMPSVMRVNKRTGKDRVRLQGSMLKPSSLVVVHPLAKPGADPCLYQNGGCEHICKKRLGTAWCSCREGFMKASDGKTCLALDGHQLLAGGEVDLKNQVTPLDILSKTRVSEDNITESQHMLVAEIMVSDQDDCAPVGCSMYARCISEGEDATCQCLKGFAGDGKLCSDIDECEMGVPVCPPASSKCINTEGGYVCRCSEGYQGDGIHCLDSTPPPHLREDDHHYSVRNSDSECPLSHDGYCLHDGVCMYIEALDKYACNCVVGYIGERCQYRDLKWWELRHAGHGQQQKVIVVAVCVVVLVMLLLLSLWGAHYYRTQKLLSKNPKNPYEESSRDVRSRRPADTEDGMSSCPQPWFVVIKEHQDLKNGGQPVAGEDGQAADGSMQPTSWRQEPQLCGMGTEQGCWIPVSSDKGSCPQVMERSFHMPSYGTQTLEGGVEKPHSLLSANPLWQQRALDPPHQMELTQ

SEQ ID NO: 381 - protein, 200 aa, Homo sapiens
MAFTEHSPLTPHRRDLCSRSIWLARKIRSDLTALTESYVKHQGLNKNINLDSADGMPVASTDQWSELTEAERLQENLQAYRTFHVLLARLLEDQQVHFTPTEGDFHQAIHTLLLQVAAFAYQIEELMILLEYKIPRNEADGMPINVGDGGLFEKKLWGLKVLQELSQWTVRSIHDLRFISSHQTGIPARGSHYIANNKKM

SEQ ID NO: 382 - protein, 241 aa, Homo sapiens
MSMLFYTLITAFLIGIQAEPHSESNVPAGHTIPQAHWTKLQHSLDTALRRARSAPAAAIAARVAGQTRNITVDPRLFKKRRLRSPRVLFSTQPPREAADTQDLDFEVGGAAPFNRTHRSKRSSSHPIFHRGEFSVCDSVSVWVGDKTTATDIKGKEVMVLGEVNINNSVFKQYFFETKCRDPNPVDSGCRGIDSKHWNSYCTTTHTFVKALTMDGKQAAWRFIRIDTACVCVLSRKAVRRA

SEQ ID NO: 383 - protein, 462 aa, Homo sapiens
MLLLARCLLLVLVSSLLVCSGLACGPGRGFGKRRHPKKLTPLAYKQFIPNVAEKTLGASGRYEGKISRNSERFKELTPNYNPDIIFKDEENTGADRLMTQRCKDKLNALAISVMNQWPGVKLRVTEGWDEDGHHSEESLHYEGRAVDITTSDRDRSKYGMLARLAVEAGFDWVYYESKAHIHCSVKAENSVAAKSGGCFPGSATVHLEQGGTKLVKDLSPGDRVLAADDQGRLLYSDFLTFLDRDDGAKKVFYVIETREPRERLLLTAAHLLFVAPHNDSATGEPEASSGSGPPSGGALGPRALFASRVRPGQRVYVVAERDGDRRLLPAAVHSVTLSEEAAGAYAPLTAQGTILINRVLASCYAVIEEHSWAHRAFAPFRLAHALLAALAPARTDRGGDSGGGDRGGGGGRVALTAPGAADAPGAGATAGIHWYSQLLYQIGTWLLDSEALHPLGMAVKSS

SEQ ID NO: 384 - protein, 244 aa, Homo sapiens
MGSPRSALSCLLLHLLVLCLQAQEGPGRGPALGRELASLFRAGREPQGVSQQVTVQSSPNFTQHVREQSLVTDQLSRRLIRTYQLYSRTSGKHVQVLANKRINAMAEDGDPFAKLIVETDTFGSRVRVRGAETGLYICMNKKGKLIAKSNGKGKDCVFTEIVLENNYTALQNAKYEGWYMAFTRKGRPRKGSKTRQHQREVHFMKRLPRGHHTTEQSLRFEFLNYPPFTRSLRGSQRTWAPEPR

SEQ ID NO: 385 - protein, 233 aa, Homo sapiens
MGSPRSALSCLLLHLLVLCLQAQEGPGRGPALGRELASLFRAGREPQGVSQQHVREQSLVTDQLSRRLIRTYQLYSRTSGKHVQVLANKRINAMAEDGDPFAKLIVETDTFGSRVRVRGAETGLYICMNKKGKLIAKSNGKGKDCVFTEIVLENNYTALQNAKYEGWYMAFTRKGRPRKGSKTRQHQREVHFMKRLPRGHHTTEQSLRFEFLNYPPFTRSLRGSQRTWAPEPR

SEQ ID NO: 386 - protein, 215 aa, Homo sapiens
MGSPRSALSCLLLHLLVLCLQAQVTVQSSPNFTQHVREQSLVTDQLSRRLIRTYQLYSRTSGKHVQVLANKRINAMAEDGDPFAKLIVETDTFGSRVRVRGAETGLYICMNKKGKLIAKSNGKGKDCVFTEIVLENNYTALQNAKYEGWYMAFTRKGRPRKGSKTRQHQREVHFMKRLPRGHHTTEQSLRFEFLNYPPFTRSLRGSQRTWAPEPR

SEQ ID NO: 387 - protein, 204 aa, Homo sapiens
MGSPRSALSCLLLHLLVLCLQAQHVREQSLVTDQLSRRLIRTYQLYSRTSGKHVQVLANKRINAMAEDGDPFAKLIVETDTFGSRVRVRGAETGLYICMNKKGKLIAKSNGKGKDCVFTEIVLENNYTALQNAKYEGWYMAFTRKGRPRKGSKTRQHQREVHFMKRLPRGHHTTEQSLRFEFLNYPPFTRSLRGSQRTWAPEPR

SEQ ID NO: 388 - protein, 160 aa, Homo sapiens
MVPSAGQLALFALGIVLAACQALENSTSPLSADPPVAAAVVSHFNDCPDSHTQFCFHGTCRFLVQEDKPACVCHSGYVGARCEHADLLAVVAASQKKQAITALVVVSIVALAVLIITCVLIHCCQVRKHCEWCRALICRHEKPSALLKGRTACCHSETVV

SEQ ID NO: 389 - protein, 159 aa, Homo sapiens
MVPSAGQLALFALGIVLAACQALENSTSPLSDPPVAAAVVSHFNDCPDSHTQFCFHGTCRFLVQEDKPACVCHSGYVGARCEHADLLAVVAASQKKQAITALVVVSIVALAVLIITCVLIHCCQVRKHCEWCRALICRHEKPSALLKGRTACCHSETVV

SEQ ID NO: 390 - protein, 390 aa, Homo sapiens
MPPSGLRLLPLLLPLLWLLVLTPGRPAAGLSTCKTIDMELVKRKRIEAIRGQILSKLRLASPPSQGEVPPGPLPEAVLALYNSTRDRVAGESAEPEPEPEADYYAKEVTRVLMVETHNEIYDKFKQSTHSIYMFFNTSELREAVPEPVLLSRAELRLLRLKLKVEQHVELYQKYSNNSWRYLSNRLLAPSDSPEWLSFDVTGVVRQWLSRGGEIEGFRLSAHCSCDSRDNTLQVDINGFTTGRRGDLATIHGMNRPFLLLMATPLERAQHLQSSRHRRALDTNYCFSSTEKNCCVRQLYIDFRKDLGWKWIHEPKGYHANFCLGPCPYIWSLDTQYSKVLALYNQHNPGASAAPCCVPQALEPLPIVYYVGRKPKVEQLSNMIVRSCKCS

SEQ ID NO: 391 - protein, 414 aa, Homo sapiens
MHYCVLSAFLILHLVTVALSLSTCSTLDMDQFMRKRIEAIRGQILSKLKLTSPPEDYPEPEEVPPEVISIYNSTRDLLQEKASRRAAACERERSDEEYYAKEVYKIDMPPFFPSENAIPPTFYRPYFRIVRFDVSAMEKNASNLVKAEFRVFRLQNPKARVPEQRIELYQILKSKDLTSPTQRYIDSKVVKTRAEGEWLSFDVTDAVHEWLHHKDRNLGFKISLHCPCCTFVPSNNYIIPNKSEELEARFAGIDGTSTYTSGDQKTIKSTRKKNSGKTPHLLLMLLPSYRLESQQTNRRKKRALDAAYCFRNVQDNCCLRPLYIDFKRDLGWKWIHEPKGYNANFCAGACPYLWSSDTQHSRVLSLYNTINPEASASPCCVSQDLEPLTILYYIGKTPKIEQLSNMIVKSCKCS

SEQ ID NO: 392 - protein, 442 aa, Homo sapiens
MHYCVLSAFLILHLVTVALSLSTCSTLDMDQFMRKRIEAIRGQILSKLKLTSPPEDYPEPEEVPPEVISIYNSTRDLLQEKASRRAAACERERSDEEYYAKEVYKIDMPPFFPSETVCPVVTTPSGSVGSLCSRQSQVLCGYLDAIPPTFYRPYFRIVRFDVSAMEKNASNLVKAEFRVFRLQNPKARVPEQRIELYQILKSKDLTSPTQRYIDSKVVKTRAEGEWLSFDVTDAVHEWLHHKDRNLGFKISLHCPCCTFVPSNNYIIPNKSEELEARFAGIDGTSTYTSGDQKTIKSTRKKNSGKTPHLLLMLLPSYRLESQQTNRRKKRALDAAYCFRNVQDNCCLRPLYIDFKRDLGWKWIHEPKGYNANFCAGACPYLWSSDTQHSRVLSLYNTINPEASASPCCVSQDLEPLTILYYIGKTPKIEQLSNMIVKSCKCS

SEQ ID NO: 393 - protein, 309 aa, Homo sapiens
MKMHLQRALVVLALLNFATVSLSLSTCTTLDFGHIKKKRVEAIRGQILSKLRLTSPPEPTVMTHVPYQVLALYNSTRELLEEMHGEREEGCTQENTESEYYAKEIHKFDMIQGLAEHNELAVCPKGITSKVFRFNVSSVEKNRTNLFRAEFRVLRVPNPSSKRNEQRIELFQILRPDEHIAKQRYIGGKNLPTRGTAEWLSFDVTDTVREWLLRRESNLGLEISIHCPCHTFQPNGDILENIHEVMEIKFKGVDNEDDHGRGDLGRLKKQKDHHNPHLILMMIPPHRLDNPGQGGQRKKRALDTNYCFR

SEQ ID NO: 394 - protein, 412 aa, Homo sapiens
MKMHLQRALVVLALLNFATVSLSLSTCTTLDFGHIKKKRVEAIRGQILSKLRLTSPPEPTVMTHVPYQVLALYNSTRELLEEMHGEREEGCTQENTESEYYAKEIHKFDMIQGLAEHNELAVCPKGITSKVFRFNVSSVEKNRTNLFRAEFRVLRVPNPSSKRNEQRIELFQILRPDEHIAKQRYIGGKNLPTRGTAEWLSFDVTDTVREWLLRRESNLGLEISIHCPCHTFQPNGDILENIHEVMEIKFKGVDNEDDHGRGDLGRLKKQKDHHNPHLILMMIPPHRLDNPGQGGQRKKRALDTNYCFRNLEENCCVRPLYIDFRQDLGWKWVHEPKGYYANFCSGPCPYLRSADTTHSTVLGLYNTLNPEASASPCCVPQDLEPLTILYYVGRTPKVEQLSNMVVKSCKCS

SEQ ID NO: 395 - RNA, 1317 nt, Artificial Sequence
  Description of Artificial Sequence: Synthetic Transcript Sequence
augccccucaacguuagcuucaccaacaggaacuaugaccucgacuacgacucggugcagccguauuucuacugcgacgaggaggagaacuucuaccagcagcagcagcagagcgagcugcagcccccggcgcccagcgaggauaucuggaagaaauucgagcugcugcccaccccgccccuguccccuagccgccgcuccgggcucugcucgcccuccuacguugcggucacacccuucucccuucggggagacaacgacggcgguggcgggagcuucuccacggccgaccagcuggagauggugaccgagcugcugggaggagacauggugaaccagaguuucaucugcgacccggacgacgagaccuucaucaaaaacaucaucauccaggacuguauguggagcggcuucucggccgccgccaagcucgucucagagaagcuggccuccuaccaggcugcgcgcaaagacagcggcagcccgaaccccgcccgcggccacagcgucugcuccaccuccagcuuguaccugcaggaucugagcgccgccgccucagagugcaucgaccccucgguggucuuccccuacccucucaacgacagcagcucgcccaaguccugcgccucgcaagacuccagcgccuucucuccguccucggauucucugcucuccucgacggaguccuccccgcagggcagccccgagccccuggugcuccaugaggagacaccgcccaccaccagcagcgacucugaggaggaacaagaagaugaggaagaaaucgauguuguuucuguggaaaagaggcaggcuccuggcaaaaggucagagucuggaucaccuucugcuggaggccacagcaaaccuccucacagcccacugguccucaagaggugccacgucuccacacaucagcacaacuacgcagcgccucccuccacucggaaggacuauccugcugccaagagggucaaguuggacagugucagaguccugagacagaucagcaacaaccgaaaaugcaccagccccagguccucggacaccgaggagaaugucaagaggcgaacacacaacgucuuggagcgccagaggaggaacgagcuaaaacggagcuuuuuugcccugcgugaccagaucccggaguuggaaaacaaugaaaaggcccccaagguaguuauccuuaaaaaagccacagcauacauccuguccguccaagcagaggagcaaaagcucauuucugaagaggacuuguugcggaaacgacgagaacaguugaaacacaaacuugaacagcuacggaacucuugugcg

SEQ ID NO: 396 - DNA, 1317 bp, Artificial Sequence
  Description of Artificial Sequence: Synthetic Transcript Sequence
atgcccctcaacgttagcttcaccaacaggaactatgacctcgactacgactcggtgcagccgtatttctactgcgacgaggaggagaacttctaccagcagcagcagcagagcgagctgcagcccccggcgcccagcgaggatatctggaagaaattcgagctgctgcccaccccgcccctgtcccctagccgccgctccgggctctgctcgccctcctacgttgcggtcacacccttctcccttcggggagacaacgacggcggtggcgggagcttctccacggccgaccagctggagatggtgaccgagctgctgggaggagacatggtgaaccagagtttcatctgcgacccggacgacgagaccttcatcaaaaacatcatcatccaggactgtatgtggagcggcttctcggccgccgccaagctcgtctcagagaagctggcctcctaccaggctgcgcgcaaagacagcggcagcccgaaccccgcccgcggccacagcgtctgctccacctccagcttgtacctgcaggatctgagcgccgccgcctcagagtgcatcgacccctcggtggtcttcccctaccctctcaacgacagcagctcgcccaagtcctgcgcctcgcaagactccagcgccttctctccgtcctcggattctctgctctcctcgacggagtcctccccgcagggcagccccgagcccctggtgctccatgaggagacaccgcccaccaccagcagcgactctgaggaggaacaagaagatgaggaagaaatcgatgttgtttctgtggaaaagaggcaggctcctggcaaaaggtcagagtctggatcaccttctgctggaggccacagcaaacctcctcacagcccactggtcctcaagaggtgccacgtctccacacatcagcacaactacgcagcgcctccctccactcggaaggactatcctgctgccaagagggtcaagttggacagtgtcagagtcctgagacagatcagcaacaaccgaaaatgcaccagccccaggtcctcggacaccgaggagaatgtcaagaggcgaacacacaacgtcttggagcgccagaggaggaacgagctaaaacggagcttttttgccctgcgtgaccagatcccggagttggaaaacaatgaaaaggcccccaaggtagttatccttaaaaaagccacagcatacatcctgtccgtccaagcagaggagcaaaagctcatttctgaagaggacttgttgcggaaacgacgagaacagttgaaacacaaacttgaacagctacggaactcttgtgcg

SEQ ID NO: 397 - RNA, 1437 nt, Artificial Sequence
  Description of Artificial Sequence: Synthetic Transcript Sequence
augaggcagccaccuggcgagucugacauggcugucagcgacgcgcugcucccaucuuucuccacguucgcgucuggcccggcgggaagggagaagacacugcgucaagcaggugccccgaauaaccgcuggcgggaggagcucucccacaugaagcgacuucccccagugcuucccggccgccccuaugaccuggcggcggcgaccguggccacagaccuggagagcggcggagccggugcggcuugcggcgguagcaaccuggcgccccuaccucggagagagaccgaggaguucaacgaucuccuggaccuggacuuuauucucuccaauucgcugacccauccuccggagucaguggccgccaccguguccucgucagcgucagccuccucuucgucgucgccgucgagcagcggcccugccagcgcgcccuccaccugcagcuucaccuauccgauccgggccgggaacgacccgggcguggcgccgggcggcacgggcggaggccuccucuauggcagggaguccgcucccccuccgacggcucccuucaaccuggcggacaucaacgacgugagccccucgggcggcuucguggccgagcuccugcggccagaauuggacccgguguacauuccgccgcagcagccgcagccgccagguggcgggcugaugggcaaguucgugcugaaggcgucgcugagcgccccuggcagcgaguacggcagcccgucggucaucagcgucagcaaaggcagcccugacggcagccacccgguggugguggcgcccuacaacggcgggccgccgcgcacgugccccaagaucaagcaggaggcggucucuucgugcacccacuugggcgcuggacccccucucagcaauggccaccggccggcugcacacgacuucccccuggggcggcagcuccccagcaggacuaccccgacccugggucuugaggaagugcugagcagcagggacugucacccugcccugccgcuuccucccggcuuccauccccacccggggcccaauuacccauccuuccugcccgaucagaugcagccgcaagucccgccgcuccauuaccaagagcucaugccacccgguuccugcaugccagaggagcccaagccaaagaggggaagacgaucguggccccggaaaaggaccgccacccacacuugugauuacgcgggcugcggcaaaaccuacacaaagaguucccaucucaaggcacaccugcgaacccacacaggugagaaaccuuaccacugugacugggacggcuguggauggaaauucgcccgcucagaugaacugaccaggcacuaccguaaacacacggggcaccgcccguuccagugccaaaaaugcgaccgagcauuuuccaggucggaccaccucgccuuacacaugaagaggcauuuu

SEQ ID NO: 398 - DNA, 1437 bp, Artificial Sequence
  Description of Artificial Sequence: Synthetic Transcript Sequence
atgaggcagccacctggcgagtctgacatggctgtcagcgacgcgctgctcccatctttctccacgttcgcgtctggcccggcgggaagggagaagacactgcgtcaagcaggtgccccgaataaccgctggcgggaggagctctcccacatgaagcgacttcccccagtgcttcccggccgcccctatgacctggcggcggcgaccgtggccacagacctggagagcggcggagccggtgcggcttgcggcggtagcaacctggcgcccctacctcggagagagaccgaggagttcaacgatctcctggacctggactttattctctccaattcgctgacccatcctccggagtcagtggccgccaccgtgtcctcgtcagcgtcagcctcctcttcgtcgtcgccgtcgagcagcggccctgccagcgcgccctccacctgcagcttcacctatccgatccgggccgggaacgacccgggcgtggcgccgggcggcacgggcggaggcctcctctatggcagggagtccgctccccctccgacggctcccttcaacctggcggacatcaacgacgtgagcccctcgggcggcttcgtggccgagctcctgcggccagaattggacccggtgtacattccgccgcagcagccgcagccgccaggtggcgggctgatgggcaagttcgtgctgaaggcgtcgctgagcgcccctggcagcgagtacggcagcccgtcggtcatcagcgtcagcaaaggcagccctgacggcagccacccggtggtggtggcgccctacaacggcgggccgccgcgcacgtgccccaagatcaagcaggaggcggtctcttcgtgcacccacttgggcgctggaccccctctcagcaatggccaccggccggctgcacacgacttccccctggggcggcagctccccagcaggactaccccgaccctgggtcttgaggaagtgctgagcagcagggactgtcaccctgccctgccgcttcctcccggcttccatccccacccggggcccaattacccatccttcctgcccgatcagatgcagccgcaagtcccgccgctccattaccaagagctcatgccacccggttcctgcatgccagaggagcccaagccaaagaggggaagacgatcgtggccccggaaaaggaccgccacccacacttgtgattacgcgggctgcggcaaaacctacacaaagagttcccatctcaaggcacacctgcgaacccacacaggtgagaaaccttaccactgtgactgggacggctgtggatggaaattcgcccgctcagatgaactgaccaggcactaccgtaaacacacggggcaccgcccgttccagtgccaaaaatgcgaccgagcattttccaggtcggaccacctcgccttacacatgaagaggcatttt

SEQ ID NO: 399 - RNA, 627 nt, Artificial Sequence
  Description of Artificial Sequence: Synthetic Transcript Sequence
augggaucagucuccaaccaacaauuugccggugggugcgccaaggcagcagaggaagcgccagaagaagcucccgaggaugccgcacgugcagccgaugagccucagcugcuucauggugcaggcauuugcaagugguucaauguucgaauggguuuuggauuccuuucaaugaccgcaagagcaggaguggcccuugauccacccguggauguguuugugcaccagucgaagcugcacauggaaggauuccgcucgcuuaaggaaggagaagcagucgaguuuaccuuuaagaagucugcuaaggggcucgaaagcaucagagucacgggaccaggagguguguuuuguaucggcucggagcggaggccuaaagggaaguccaugcaaaagcgcagaucaaaaggagacaggugcuacaacugugguggucuggaccaucaugcgaaggaauguaagcucccuccgcagcccaaaaagugucacuucugucaguccauaucgcauaugguggcauccuguccauugaaagcacagcaaggcccuagcgcacaaggcaaaccuacuuacuuucgggaagaggaggaagaaauucauagcccuacucugcugccagaagcgcaaaac

SEQ ID NO: 400 - DNA, 627 bp, Artificial Sequence
  Description of Artificial Sequence: Synthetic Transcript Sequence
atgggatcagtctccaaccaacaatttgccggtgggtgcgccaaggcagcagaggaagcgccagaagaagctcccgaggatgccgcacgtgcagccgatgagcctcagctgcttcatggtgcaggcatttgcaagtggttcaatgttcgaatgggttttggattcctttcaatgaccgcaagagcaggagtggcccttgatccacccgtggatgtgtttgtgcaccagtcgaagctgcacatggaaggattccgctcgcttaaggaaggagaagcagtcgagtttacctttaagaagtctgctaaggggctcgaaagcatcagagtcacgggaccaggaggtgtgttttgtatcggctcggagcggaggcctaaagggaagtccatgcaaaagcgcagatcaaaaggagacaggtgctacaactgtggtggtctggaccatcatgcgaaggaatgtaagctccctccgcagcccaaaaagtgtcacttctgtcagtccatatcgcatatggtggcatcctgtccattgaaagcacagcaaggccctagcgcacaaggcaaacctacttactttcgggaagaggaggaagaaattcatagccctactctgctgccagaagcgcaaaac

SEQ ID NO: 401 - RNA, 951 nt, Artificial Sequence
  Description of Artificial Sequence: Synthetic Transcript Sequence
auguacaauaugauggaaaccgaacugaagccacccgguccgcaacagacgucaggcgguggcggagguaauuccacugcagcagcagcaggagggaaucagaaaaacucuccugacagagugaagcgcccuaugaacgcauucauggucuggucaagaggacagagacggaagauggcacaagaaaauccgaaaaugcacaacucagagaucagcaagagacuuggcgcugaauggaaacuucuguccgagacggaaaagcggccuuuuauagacgaagcaaagaggcuucgcgcacuccauaugaaggaacaucccgauuacaaguaccguccaagacgaaaaaccaagacucuuaugaagaaggauaaguacacucuuccugguggacugcuggcgccagggggaaauucgauggccucgggagucggggucggagcuggacugggagcgggagugaaccaacgcauggauucguacgcccauaugaacgguuggagcaauggcagcuauuccaugaugcaagaucaacugggauacccccaacaucccggucuuaacgcccacggcgcagcacaaaugcagccuaugcaccgguacgauguuucggcgcugcaauacaacucgaugaccuccucacagacuuacaugaacgguuccccaaccuauucgaugucauacucgcagcaagggaccccuggcauggcacucgguagcaugggaucaguggugaaauccgaagcaagcagcagcccuccaguggucacuuccagcucccauucgcgugcgccuugucaagcuggcgaccucagggacaugauuucgauguaccugccaggagccgaggugccggagcccgcagccccaucgcgauugcacaugucacagcauuaccaguccggaccagugccugguaccgccauuaacgggacccucccuuugucccauaug

SEQ ID NO: 402 - DNA, 951 bp, Artificial Sequence
  Description of Artificial Sequence: Synthetic Transcript Sequence
atgtacaatatgatggaaaccgaactgaagccacccggtccgcaacagacgtcaggcggtggcggaggtaattccactgcagcagcagcaggagggaatcagaaaaactctcctgacagagtgaagcgccctatgaacgcattcatggtctggtcaagaggacagagacggaagatggcacaagaaaatccgaaaatgcacaactcagagatcagcaagagacttggcgctgaatggaaacttctgtccgagacggaaaagcggccttttatagacgaagcaaagaggcttcgcgcactccatatgaaggaacatcccgattacaagtaccgtccaagacgaaaaaccaagactcttatgaagaaggataagtacactcttcctggtggactgctggcgccagggggaaattcgatggcctcgggagtcggggtcggagctggactgggagcgggagtgaaccaacgcatggattcgtacgcccatatgaacggttggagcaatggcagctattccatgatgcaagatcaactgggatacccccaacatcccggtcttaacgcccacggcgcagcacaaatgcagcctatgcaccggtacgatgtttcggcgctgcaatacaactcgatgacctcctcacagacttacatgaacggttccccaacctattcgatgtcatactcgcagcaagggacccctggcatggcactcggtagcatgggatcagtggtgaaatccgaagcaagcagcagccctccagtggtcacttccagctcccattcgcgtgcgccttgtcaagctggcgacctcagggacatgatttcgatgtacctgccaggagccgaggtgccggagcccgcagccccatcgcgattgcacatgtcacagcattaccagtccggaccagtgcctggtaccgccattaacgggaccctccctttgtcccatatg

SEQ ID NO: 403 - RNA, 1080 nt, Artificial Sequence
  Description of Artificial Sequence: Synthetic Transcript Sequence
auggcaggacaucucgcaucagacuucgcauuuucaccaccaccaggaggaggaggggacggaccaggggguccggagccgggaugggucgacccgaggacuuggcugagcuuccaaggcccgccuggcggacccggaaucggaccgggcgucgggccaggcuccgaggucuggggaaucccaccuugcccuccgccauacgaguucugcggcgggauggccuauugcgguccgcaagugggugugggacucgugccccagggcggauuggaaaccucgcagccggaaggugaagcuggcgugggcguugagucgaacuccgauggagccuccccggagccuugcaccgucaccccgggagccgugaagcucgagaaagaaaagcucgaacagaaccccgaagagagccaagauaucaaggcacuccagaaagaacucgaacaguuugcgaagcugcugaagcagaagcggaucacucuggguuacacccaggccgaugugggacugacucucggugugcuguucgggaagguguucucucaaacgacuaucuguagauucgaggcccugcagcugucguucaagaauauguguaaacugcgcccccugcugcaaaaauggguggaagaagcagacaacaacgagaacuugcaagagauuugcaaggccgaaaccuuggugcaagcccgcaagaggaagcggaccagcaucgaaaaucgcguuagaggaaaucuugagaaccuguuccuucagugcccaaagccaacgcugcagcaaauuucacacaucgcgcagcagcucggacuggagaaagacguggugcgagugugguucugcaaccgccggcagaaaggaaagagauccagcucagauuacgcgcagcgggaggacuuugaagcugccggaucccccuuuucggggggaccggucagcuucccacuggccccuggcccgcacuuugguaccccgggauacggauccccgcacuucacugcucuguacucgucgguccccuucccggaaggcgaagcguucccuccugucucagugacuacucuuggaucgccgaugcauagcaau

SEQ ID NO: 404 - DNA, 1080 bp, Artificial Sequence
  Description of Artificial Sequence: Synthetic Transcript Sequence
atggcaggacatctcgcatcagacttcgcattttcaccaccaccaggaggaggaggggacggaccagggggtccggagccgggatgggtcgacccgaggacttggctgagcttccaaggcccgcctggcggacccggaatcggaccgggcgtcgggccaggctccgaggtctggggaatcccaccttgccctccgccatacgagttctgcggcgggatggcctattgcggtccgcaagtgggtgtgggactcgtgccccagggcggattggaaacctcgcagccggaaggtgaagctggcgtgggcgttgagtcgaactccgatggagcctccccggagccttgcaccgtcaccccgggagccgtgaagctcgagaaagaaaagctcgaacagaaccccgaagagagccaagatatcaaggcactccagaaagaactcgaacagtttgcgaagctgctgaagcagaagcggatcactctgggttacacccaggccgatgtgggactgactctcggtgtgctgttcgggaaggtgttctctcaaacgactatctgtagattcgaggccctgcagctgtcgttcaagaatatgtgtaaactgcgccccctgctgcaaaaatgggtggaagaagcagacaacaacgagaacttgcaagagatttgcaaggccgaaaccttggtgcaagcccgcaagaggaagcggaccagcatcgaaaatcgcgttagaggaaatcttgagaacctgttccttcagtgcccaaagccaacgctgcagcaaatttcacacatcgcgcagcagctcggactggagaaagacgtggtgcgagtgtggttctgcaaccgccggcagaaaggaaagagatccagctcagattacgcgcagcgggaggactttgaagctgccggatcccccttttcggggggaccggtcagcttcccactggcccctggcccgcactttggtaccccgggatacggatccccgcacttcactgctctgtactcgtcggtccccttcccggaaggcgaagcgttccctcctgtctcagtgactactcttggatcgccgatgcatagcaat

SEQ ID NO: 405 - DNA, 615 bp, Homo sapiens
atggctggacctgccacccagagccccatgaagctgatggccctgcagctgctgctgtggcacagtgcactctggacagtgcaggaagccacccccctgggccctgccagctccctgccccagagcttcctgctcaagtgcttagagcaagtgaggaagatccagggcgatggcgcagcgctccaggagaagctgtgtgccacctacaagctgtgccaccccgaggagctggtgctgctcggacactctctgggcatcccctgggctcccctgagcagctgccccagccaggccctgcagctggcaggctgcttgagccaactccatagcggccttttcctctaccaggggctcctgcaggccctggaagggatctcccccgagttgggtcccaccttggacacactgcagctggacgtcgccgactttgccaccaccatctggcagcagatggaagaactgggaatggcccctgccctgcagcccacccagggtgccatgccggccttcgcctctgctttccagcgccgggcaggaggggtcctggttgcctcccatctgcagagcttcctggaggtgtcgtaccgcgttctacgccaccttgcccagccctga

SEQ ID NO: 406 - DNA, 800 bp, Artificial Sequence
  Description of Artificial Sequence: Synthetic Transcript Sequence
taatacgactcactatagggaaataagagagaaaagaagagtaagaagaaatataagagccaccatggctggacctgccacccagagccccatgaagctgatggccctgcagctgctgctgtggcacagtgcactctggacagtgcaggaagccacccccctgggccctgccagctccctgccccagagcttcctgctcaagtgcttagagcaagtgaggaagatccagggcgatggcgcagcgctccaggagaagctgtgtgccacctacaagctgtgccaccccgaggagctggtgctgctcggacactctctgggcatcccctgggctcccctgagcagctgccccagccaggccctgcagctggcaggctgcttgagccaactccatagcggccttttcctctaccaggggctcctgcaggccctggaagggatctcccccgagttgggtcccaccttggacacactgcagctggacgtcgccgactttgccaccaccatctggcagcagatggaagaactgggaatggcccctgccctgcagcccacccagggtgccatgccggccttcgcctctgctttccagcgccgggcaggaggggtcctggttgcctcccatctgcagagcttcctggaggtgtcgtaccgcgttctacgccaccttgcccagccctgaagcgctgccttctgcggggcttgccttctggccatgcccttcttctctcccttgcacctgtacctcttggtctttgaataaagcctgagtaggaaggcggccgctcgagcatgcatctaga

SEQ ID NO: 407 - DNA, 800 bp, Artificial Sequence
  Description of Artificial Sequence: Synthetic Transcript Sequence
taatacgactcactatagggaaataagagagaaaagaagagtaagaagaaatataagagccaccatggccggtcccgcgacccaaagccccatgaaacttatggccctgcagttgctgctttggcactcggccctctggacagtccaagaagcgactcctctcggacctgcctcatcgttgccgcagtcattccttttgaagtgtctggagcaggtgcgaaagattcagggcgatggagccgcactccaagagaagctctgcgcgacatacaaactttgccatcccgaggagctcgtactgctcgggcacagcttggggattccctgggctcctctctcgtcctgtccgtcgcaggctttgcagttggcagggtgcctttcccagctccactccggtttgttcttgtatcagggactgctgcaagcccttgagggaatctcgccagaattgggcccgacgctggacacgttgcagctcgacgtggcggatttcgcaacaaccatctggcagcagatggaggaactggggatggcacccgcgctgcagcccacgcagggggcaatgccggcctttgcgtccgcgtttcagcgcagggcgggtggagtcctcgtagcgagccaccttcaatcatttttggaagtctcgtaccgggtgctgagacatcttgcgcagccgtgaagcgctgccttctgcggggcttgccttctggccatgcccttcttctctcccttgcacctgtacctcttggtctttgaataaagcctgagtaggaaggcggccgctcgagcatgcatctaga

SEQ ID NO: 408 - RNA, 758 nt, Artificial Sequence
  Description of Artificial Sequence: Synthetic Transcript Sequence
gggaaauaagagagaaaagaagaguaagaagaaauauaagagccaccauggccggucccgcgacccaaagccccaugaaacuuauggcccugcaguugcugcuuuggcacucggcccucuggacaguccaagaagcgacuccucucggaccugccucaucguugccgcagucauuccuuuugaagugucuggagcaggugcgaaagauucagggcgauggagccgcacuccaagagaagcucugcgcgacauacaaacuuugccaucccgaggagcucguacugcucgggcacagcuuggggauucccugggcuccucucucguccuguccgucgcaggcuuugcaguuggcagggugccuuucccagcuccacuccgguuuguucuuguaucagggacugcugcaagcccuugagggaaucucgccagaauugggcccgacgcuggacacguugcagcucgacguggcggauuucgcaacaaccaucuggcagcagauggaggaacuggggauggcacccgcgcugcagcccacgcagggggcaaugccggccuuugcguccgcguuucagcgcagggcggguggaguccucguagcgagccaccuucaaucauuuuuggaagucucguaccgggugcugagacaucuugcgcagccgugaagcgcugccuucugcggggcuugccuucuggccaugcccuucuucucucccuugcaccuguaccucuuggucuuugaauaaagccugaguaggaag

SEQ ID NO: 409 - RNA, 1796 nt, Artificial Sequence
  Description of Artificial Sequence: Synthetic Transcript Sequence
gggaaauaagagagaaaagaagaguaagaagaaauauaagagccaccauggaagaugcgaagaacaucaagaagggaccugccccguuuuacccuuuggaggacgguacagcaggagaacagcuccacaaggcgaugaaacgcuacgcccugguccccggaacgauugcguuuaccgaugcacauauugagguagacaucacauacgcagaauacuucgaaaugucggugaggcuggcggaagcgaugaagagauauggucuuaacacuaaucaccgcaucgugguguguucggagaacucauugcaguuuuucaugccgguccuuggagcacuuuucaucggggucgcagucgcgccagcgaacgacaucuacaaugagcgggaacucuugaauagcaugggaaucucccagccgacggucguguuugucuccaaaaaggggcugcagaaaauccucaacgugcagaagaagcuccccauuauucaaaagaucaucauuauggauagcaagacagauuaccaaggguuccagucgauguauaccuuugugacaucgcauuugccgccaggguuuaacgaguaugacuucguccccgagucauuugacagagauaaaaccaucgcgcugauuaugaauuccucggguagcaccgguuugccaaaggggguggcguugccccaccgcacugcuugugugcgguucucgcacgcuagggauccuaucuuugguaaucagaucauucccgacacagcaauccuguccgugguaccuuuucaucacgguuuuggcauguucacgacucucggcuauuugauuugcgguuucagggucguacuuauguaucgguucgaggaagaacuguuuuugagauccuugcaagauuacaagauccagucggcccuccuugugccaacgcuuuucucauucuuugcgaaaucgacacuuauugauaaguaugaccuuuccaaucugcaugagauugccucagggggagcgccgcuuagcaaggaagucggggaggcaguggccaagcgcuuccaccuucccggaauucggcagggauacgggcucacggagacaacauccgcgauccuuaucacgcccgagggugacgauaagccgggagccgucggaaaagugguccccuucuuugaagccaaggucguagaccucgacacgggaaaaacccucggagugaaccagaggggcgagcucugcgugagagggccgaugaucaugucagguuacgugaauaacccugaagcgacgaaugcgcugaucgacaaggaugggugguugcauucgggagacauugccuauugggaugaggaugagcacuucuuuaucguagaucgacuuaagagcuugaucaaauacaaaggcuaucagguagcgccugccgagcucgagucaauccugcuccagcaccccaacauuuucgacgccggaguggccggguugcccgaugacgacgcgggugagcugccagcggccgugguaguccucgaacaugggaaaacaaugaccgaaaaggagaucguggacuacguagcaucacaagugacgacugcgaagaaacugaggggagggguagucuuuguggacgaggucccgaaaggcuugacugggaagcuugacgcucgcaaaauccgggaaauccugauuaaggcaaagaaaggcgggaaaaucgcugucugauaagcugccuucugcggggcuugccuucuggccaugcccuucuucucucccuugcaccuguaccucuuggucuuugaauaaagccugaguaggaag

SEQ ID NO: 410 - RNA, 854 nt, Artificial Sequence
  Description of Artificial Sequence: Synthetic Transcript Sequence
gggaaauaagagagaaaagaagaguaagaagaaauauaagagccaccaugguauccaagggggaggaggacaacauggcgaucaucaaggaguucaugcgauucaaggugcacauggaagguucggucaacggacacgaauuugaaaucgaaggagagggugaaggaaggcccuaugaagggacacagaccgcgaaacucaaggucacgaaagggggaccacuuccuuucgccugggacauucuuucgccccaguuuauguacggguccaaagcauaugugaagcaucccgccgauauuccugacuaucugaaacucagcuuucccgagggauucaagugggagcgggucaugaacuuugaggacggggguguagucaccguaacccaagacucaagccuccaagacggcgaguucaucuacaaggucaaacugcgggggacuaacuuuccgucggaugggccggugaugcagaagaaaacgaugggaugggaagcgucaucggagaggauguacccagaagauggugcauugaagggggagaucaagcagagacugaaguugaaagaugggggacauuaugaugccgaggugaaaacgacauacaaagcgaaaaagccggugcagcuucccggagcguauaaugugaauaucaaguuggauauuacuucacacaaugaggacuacacaauugucgaacaguacgaacgcgcugaggguagacacucgacgggaggcauggacgaguuguacaaaugauaagcugccuucugcggggcuugccuucuggccaugcccuucuucucucccuugcaccuguaccucuuggucuuugaauaaagccugaguaggaag
